(19) United States
(12) Patent Application Publication
(10) Pub. No.: US 2015/0133640 A1
(43) Pub. Date: May 14, 2015

(54) Production of T cell retargeting hetero-dimeric immunoglobulins

(71) Applicant: GLENMARK PHARMACEUTICALS S.A., La Chaux-de-Fonds (CH)

(72) Inventors: Stanislas BLEIN, La Chaux-de-Fonds (CH); Romain Ollier, La Chaux-de-Fonds (CH); Darko Skegro, La Chaux-de-Fonds (CH); Samuel Hou, La Chaux-de-Fonds (CH)

(21) Appl. No.: 14/532,923

(22) Filed: Nov. 4, 2014

(30) Foreign Application Priority Data
Nov. 4, 2013 (EP) 13191386.5

(51) Int. Cl. C07K 16/28; C07K 16/40

(52) U.S. Cl. CPC C07K 16/2809; C07K 16/40; C07K 16/2878; C07K 16/2863; C07K 16/2887; C07K 2317/526; C07K 2317/31; C07K 2317/565; C07K 2317/55
USPC 530/387.3; 435/69.6

(57) ABSTRACT

The present invention describes novel hetero-dimeric immunoglobulins or fragments thereof which bind to CD3 and a disease associated antigen. These hetero-dimeric immunoglobulins have been engineered to promote hetero-dimer formation during expression and can be purified to a high degree using a Protein A differential purification technique.

### FIELD OF THE INVENTION

[0001] The present invention relates to hetero-dimeric immunoglobulins that target both a component of the human CD3 antigen and a disease associated antigen and methods of making the same.

### BACKGROUND OF THE INVENTION

[0002] T cell redirected killing is a desirable mode of action in many therapeutic areas. Various bispecific antibody formats have been shown to mediate T cell redirection both in pre-clinical and clinical investigations (May C et al., (2012) Biochem Pharmacol, 84(9): 1105-12; Frankel S R & Baeuerle P A, (2013) Curr Opin Chem Biol, 17(3): 385-92). All T cell retargeting bispecific antibodies or fragments thereof are engineered to have at least two antigen binding sites wherein one site binds a surface antigen on a target cell and the other site binds a T cell surface antigen. Amongst T cell surface antigens, the human CD3 epsilon subunit from the TCR protein complex has been the most targeted to redirect T cell killing.

[0003] Many bispecific antibody formats have been used to redirect T cell killing, these mainly include tandem of scFv fragments and diabody based formats with only few examples of Fc-based bispecific antibody formats reported (Moore P A et al., (2011) Blood, 117(17): 4542-51; May C et al., (2012) supra; Frankel S R & Baeuerle P A, (2013) supra). Bispecific formats that will encompass a human Fc region will have longer circulation half-lives which may result in enhanced efficacy and/or less frequent dosing regimens. Among possible Fc-based bispecific formats, one preferred format to redirect T cell killing is the so-called heavy chain hetero-dimer format. This format is of particular interest as it does not allows aggregation of multiple copies of human CD3 molecules at the T cell surface thereby preventing any T cell inactivation (Klein C et al., (2012) MAbs, 4(6): 653-63).

[0004] The first described method to engineer heavy chain hetero-dimers is a method known as the “knob-into-hole” method (PCT Publication No: WO199627011; Merchant A M et al., (1998) Nat Biotechnol, 16(7): 677-81). Recently a chemical method known as the FAB-arm exchange method wherein two antibodies are combined into one bispecific antibody via reduction and in vitro reshuffling of half-immunoglobulins has been reported (PCT Publication Nos: WO2008119353 (Schuurman J et al.) and WO2013060867 (Gramer M et al.); Labrijn A F et al., (2013) Proc Natl Acad Sci USA, 110(13): 5145-50).

[0005] Both methods and derivatives thereof are currently inadequate to produce Fc-based bispecific antibody formats in mammalian cell hosts. When expressing “knob-into-hole” heavy chain hetero-dimers in mammalian cell hosts, bispecific antibody recovery is impaired by the presence of homo-dimers (Jackman J et al., (2010) J Biol Chem, 285(27): 20850-9; Klein C et al., supra). The FAB-arm exchange method and derivatives thereof suffers from the same drawback with the added problem of having first to produce the two “monospecific” antibodies separately.

[0006] When developing bispecific antibodies that redirect T cell killing via the engagement of a CD3 subunit, it is essential that no homo-dimers specific for the CD3 subunit are present in the final drug product. In the case of targeting the CD3 epsilon subunit, traces of anti-human CD3 epsilon antibody species (monospecific and bivalent for the human CD3 epsilon antigen) may trigger transient T cell activation and cytokine release before leading to T cell apoptosis thereby interfering with the goal of a controlled and specific T cell activation. Production of stable and safe Fc-based bispecific antibodies that efficiently redirect T cell killing remains a challenge to the pharmaceutical industry with respect to purity and yields. Accordingly there remains a need for a technology to efficiently produce anti-human CD3 based heavy chain hetero-dimers free of anti-human CD3 homo-dimers wherein the secreted bispecific antibody product is readily isolated from the cell culture supernatant from a recombinant mammalian host cell line.

[0007] Techniques to purify heavy chain hetero-dimers over homo-dimers based on a differential affinity for a reagent have been described. The first example of known differential affinity purification technique involved the use of two different heavy chains from two different animal species, wherein one of which does not bind the affinity reagent Protein A (Lindhofer H et al., (1995) J Immunol, 155(1): 219-225). The same authors also described the use of two different heavy chains originating from two different human immunoglobulin isotypes (IGHG1 and IGHG3), one of which does not bind the affinity reagent Protein A (IGHG3; see U.S. Pat. No. 6,551,592 Lindhofer H et al.). More recently, a variation of this technique was reported by Davis S et al. (PCT Publication No: WO2010151792) and made use of the two amino acid substitutions H435R and Y436F described by Jendeberg (1997) (Jendeberg L. et al. (1997) J Immunol Methods, 201(1): 25-34) to abrogate the affinity for the reagent Protein A in one of the hetero-dimer heavy chains.

[0008] The preferred known differential Protein A affinity purification technique of the present invention corresponds to a technique wherein all three species i.e. the two homo-dimeric species and the hetero-dimer of interest differ in their total number of Protein A binding sites by at least one site and wherein one of the two homo-dimeric species has no Protein A binding site and therefore does not bind Protein A (as shown in FIG. 1).

[0009] Drug stability is an important aspect of successful pharmaceutical development and VH3 based immunoglobulins or fragments thereof are of major importance to the biological drug industry. Therapeutic antibodies based on the VH3 subclass have been extensively developed as these frameworks bind Protein A and facilitate the testing of antibody fragments before their formatting into immunoglobulins; for example, many synthetic antibody phage display libraries used for antibody discovery are based on the VH3 subclass. In addition VH3 based antibodies are often selected for their good expression and stability over other known heavy chain variable domain subclasses.

[0010] Although a VH3 domain has only one Protein A binding site with a weaker affinity when compared to a Fc region which has two sites with a stronger affinity (Roben P W et al., (1995) J Immunol, 154(12): 6437-45), there is enough affinity to interfere with the known differential Protein A affinity purification techniques. When dealing with the purification of hetero-dimers of heavy chains wherein the heavy chain engineered in its Fc region to have no binding for Protein A encompasses one VH3 based antigen binding site, then Protein A binding is restored via the VH3 domain and the preferred technology described in FIG. 1 and above is no longer useful (FIG. 2A). In this instance, abrogating Protein A binding in the VH3 based antigen binding site provides a straightforward solution and allows to keep the initial architecture of the desired hetero-dimer (FIG. 2B). Alternatively, the heavy chain hetero-dimer can be re-engineered to have the VH3 based antigen binding site located on the heavy chain that binds Protein A in its Fc region (FIG. 2C; note that a VH3 domain has a weaker affinity for Protein A compared to a Fc monomer hence the hetero-dimer of interest still elutes at a separate pH value from the other homo-dimeric species, typically at pH 4, while the homo-dimeric species that binds Protein A now encompasses two additional Protein A binding sites and elutes at a pH value ≦3).

[0011] More importantly, when dealing with the purification of hetero-dimers of heavy chains wherein both heavy chains encompass a VH3 based antigen binding site, then the relocation strategy described above may only be partially helpful (FIG. 2D and FIG. 15B). Protein A based differential purification is only enabled when Protein A binding in at least one (FIG. 2E) or both (FIG. 2F) VH3 based antigen binding sites is abrogated.

[0012] Accordingly, there remains a need to abrogate Protein A binding within VH3 domains when undertaking the production of hetero-dimers of heavy chains encompassing this variable domain subclass.

### SUMMARY OF THE INVENTION

[0013] The present invention provides new anti-human CD3 bispecific antibodies comprising a second binding arm which can recognise and bind to a disease associated antigen.

[0014] In the context of the present invention a disease associated antigen means any antigen or epitope associated with a pathological state such as an oncogenic marker or a marker of some other metabolic or immunological dysfunction. In addition a disease marker my also relate to an infectious disease such as a pathogenic virus or bacteria.

[0015] In accordance with the present invention the two binding arms of the anti-human CD3 bispecific antibody each comprise an immunoglobulin constant region and wherein the first arm or polypeptide binds to protein A and the second arm or polypeptide does not bind to protein A.

[0016] According to the present invention the binding of the first polypeptide to protein A and the lack of binding of the second polypeptide to protein A, is not intended to mean that the second polypeptide may not have some residual binding to protein A and it is instead intended that the second polypeptide binds less well to protein A in comparison to the first arm.

[0017] According to the present invention the first and second polypeptides of the hetero-dimeric immunoglobulin or fragment thereof, comprise an engineered immunoglobulin constant region with a modified CH3 region having a protein-protein interface that favours hetero-dimer formation over homo-dimer formation. In a preferred embodiment, the present invention provides a hetero-dimeric immunoglobulin or fragment thereof wherein the first and second polypeptides comprise an engineered immunoglobulin constant region with a modified CH3 domain having a protein-protein interface, wherein the protein-protein interface of the first polypeptide comprises an amino acid substitution at a position selected from the group consisting of: 3, 5, 7, 20, 22, 26, 27, 79, 81, 84, 84.2, 85.1, 86, 88 and 90 (IMGT® numbering), and wherein the protein-protein interface of the second polypeptide comprises an amino acid substitution at a position selected from the group consisting of: 3, 5, 7, 20, 22, 26, 27, 79, 81, 84, 84.2, 84.4, 85.1, 86, 88 and 90 (IMGT® numbering).

[0018] Preferably wherein the protein-protein interface of the second polypeptide comprises an amino acid substitution at position 84.4 and at least one further substitution at a position selected from the group consisting of: 3, 5, 7, 20, 22, 26, 27, 79, 81, 84, 84.2, 85.1, 86, 88 and 90 (IMGT® numbering).

[0019] In a further embodiment, the present invention provides a hetero-dimeric immunoglobulin or fragment thereof, wherein the first and second polypeptides comprise an engineered immunoglobulin constant region with a modified CH3 domain having a protein-protein interface, wherein the protein-protein interface of the first polypeptide comprises an amino acid substitution at position 88 and at a position selected from the group consisting of: 3, 5, 7, 20, 22, 26, 27, 79, 81, 84, 84.2, 85.1, 86 and 90 (IMGT® numbering), and wherein the protein-protein interface of the second polypeptide comprises an amino acid substitution at position 85.1 and/or 86 and at a position selected from the group consisting of 3, 5, 7, 20, 22, 26, 27, 79, 81, 84, 84.2, 84.4, 88 and 90 (IMGT® numbering).

[0020] According to a further aspect of the present invention the epitope binding region of the first polypeptide binds the CD3 protein complex and the epitope binding region of the second polypeptide binds a disease associated antigen or wherein the epitope binding region of the first polypeptide binds a disease associated antigen and the epitope binding region of the second polypeptide binds the CD3 protein complex; and wherein the epitope binding region that binds the CD3 protein complex comprises a heavy chain CDR1 comprising the amino acid sequence of SEQ ID NO: 194, a heavy chain CDR2 comprising the amino acid sequence of SEQ ID NO: 195 and a heavy chain CDR3 comprising the amino acid sequence of SEQ ID NO: 196, and a light chain CDR1 comprising the amino acid sequence of SEQ ID NO: 197, a light chain CDR2 comprising the amino acid sequence of SEQ ID NO: 198 and a light chain CDR3 comprising the amino acid sequences of: SEQ ID NO: 199; or wherein the epitope binding region that binds the CD3 protein complex comprises a heavy chain CDR1 comprising the amino acid sequence of SEQ ID NO: 200, a heavy chain CDR2 comprising the amino acid sequence of SEQ ID NO: 201 and a heavy chain CDR3 comprising the amino acid sequence of SEQ ID NO: 202, and a light chain CDR1 comprising the amino acid sequence of SEQ ID NO: 203, a light chain CDR2 comprising the amino acid sequence of SEQ ID NO: 204 and a light chain CDR3 comprising the amino acid sequences of: SEQ ID NO: 205; or wherein the epitope binding region that binds the CD3 protein complex comprises a heavy chain CDR1 comprising the amino acid sequence of SEQ ID NO: 352, a heavy chain CDR2 comprising the amino acid sequence of SEQ ID NO: 353 and a heavy chain CDR3 comprising the amino acid sequence of SEQ ID NO: 354, and a light chain CDR1 comprising the amino acid sequence of SEQ ID NO: 355, a light chain CDR2 comprising the amino acid sequence of SEQ ID NO: 356 and a light chain CDR3 comprising the amino acid sequences of SEQ ID NO: 357.

[0021] Use of these new anti-human CD3 bispecific antibodies is not limited to but includes treatments of various human cancers and autoimmune and inflammatory diseases. The specific destruction of cancer cells over healthy cells and tissues represents a primary objective in oncology. Therapeutics that could safely redirect T cell killing against tumour associated cell surface antigens may offer improved clinical efficacy. Known areas of clinical unmet needs in oncology include but are not limited to breast cancer, metastatic breast cancer, ovarian cancer, pancreatic cancer, lung cancer, lymphomas and multiple myeloma. Elimination of disease-causing T cells could be more beneficial than inhibiting T cell differentiation in treating autoimmune and inflammatory diseases such as psoriasis, multiple sclerosis and diabetes.

[0022] A preferred set of disease associated antigens come from the gene products CD33, TROP2, CD105, GD2, GD3, CEA, VEGFR1, VEGFR2, NCAM, CD133, CD123, ADAM17, MCSP, PSCA, FOLR1, CD19, CD20, CD38, EpCAM, HER2, EGFR, PSMA, IgE, Integrin a4b1, CCR5, LewisY, FAP, MUC-1, Wue-1, MSP, EGFRvIII, P glycoprotein, AFP, ALK, BAGE proteins, CD30, CD40, CTLA4, ErbB3, ErbB4, Mesothelin, OX40, CA125, CAIX, CD66e, cMet, EphA2, HGF/SF, MUC1, Phosphatidylserine, TAG-72, TPBG, β-catenin, brc-abl, BRCA1, BORIS, CA9, caspase-8, CDK4, Cyclin-B1, CYP1B1, ETV6-AML, Fra-1, FOLR1, GAGE-1, GAGE-2, GloboH, glypican-3, GM3, gp100, HLA/B-raf, HLA/k-ras, HLA/MAGE-A3, hTERT, LMP2, MAGE1, MAGE2, MAGE3, MAGE4, MAGE6, MAGE12, MART-1, ML-IAP, Muc2, Muc3, Muc4, Muc5, Muc16, MUM1, NA17, NY-BR1, NY-BR62, NY-BR-85, NY-ESO1, p15, p53, PAP, PAX3 PAX5, PCTA-1, PLAC1, PRLR, PRAME, RAGE proteins, Ras, RGS5, Rho, SART-1, SART-3, Steap-1, Steap-2, survivin, TAG-72, TGF-β, TMPRSS2, Tn, TRP-1, TRP-2, tyrosinase, uroplakin-3.

[0023] A hetero-dimeric immunoglobulin or fragment thereof according to the invention, wherein the epitope binding region that binds a disease associated antigen comprises heavy chain CDR1, CDR2 and CDR3 amino acid sequences and light chain CDR1, CDR2 and CDR3 amino acid sequences, respectively, selected from the group consisting of:

[0024] i) SEQ ID NOs: 206-211;

[0025] ii) SEQ ID NOs: 212-217;

[0026] iii) SEQ ID NOs: 218-223;

[0027] iv) SEQ ID NOs: 224-229;

[0028] v) SEQ ID NOs: 230-235;

[0029] vi) SEQ ID NOs: 236-241;

[0030] vii) SEQ ID NOs: 242-247;

[0031] viii) SEQ ID NOs: 248-253;

[0032] ix) SEQ ID NOs: 254-259;

[0033] x) SEQ ID NOs: 260-265;

[0034] xi) SEQ ID NOs: 266-271; and

[0035] xii) SEQ ID NOs: 272-277;

[0036] In accordance with a further aspect of the present invention the constant region of the second polypeptide of the hetero-dimeric immunoglobulin or fragment thereof, comprises an IgG3 CH3 region.

[0037] In accordance with a further aspect of the present invention the constant region of the second polypeptide of the hetero-dimeric immunoglobulin or fragment thereof, comprises a CH3 region other than that from IgG, and the non-IgG3 CH3 region comprises at least one substitution so as to decrease/abolish protein A binding.

[0038] According to a further aspect of the present invention the epitope binding region of second polypeptide of the hetero-dimeric immunoglobulin or fragment thereof comprises a VH3 region comprising at least one modification that reduces protein A binding.

[0039] The inventors have shown that VH3 based antigen binding sites can be readily produced and purified with a high degree of purity in a single Protein A chromatography step. These antibodies may exhibit higher efficacy over current therapies in addition to their ease of production.

[0040] The present invention also provides a method to produce anti-human CD3 bispecific heavy chain hetero-dimers having at least one VH3 based antigen binding site from a recombinant mammalian host cell line wherein the bispecific antibody product is readily isolated after a single Protein A chromatography step with a high degree of purity.

[0041] In particular the modified VH3 region comprises an amino acid substitution selected from the group consisting of: 57, 65, 81, 82a and combination 19/57/59 (Kabat numbering) and even more preferably wherein the modified VH3 region comprises an amino acid substitution selected from the group consisting of: 57A, 57E, 65S, 81E, 82aS and combination 19G/57A/59A (Kabat numbering).

[0042] According to a further aspect of the present invention the hetero-dimeric immunoglobulin or fragment thereof, may comprise further substitutions wherein the heavy chain variable framework region comprises an amino acid substitution selected from the group consisting of: I34M, V48I, A49G, R58N/Y, I69L, A71T and T73K (Kabat numbering) and the light chain variable framework region comprises an amino acid substitution selected from the group consisting of: M4L, V33M, A34N, L46R, L47W, T51A, R66G, F71Y and P96F (Kabat numbering); or wherein the heavy chain variable framework region comprises the amino acid substitutions I34M, A49G and A71T (Kabat numbering) and the light chain variable framework region comprises the amino acid substitutions M4L, L46R, L47W and F71Y (Kabat numbering).

[0043] In a further embodiment, the epitope binding region that binds to the CD3 protein complex comprises a heavy chain variable framework region that is the product of or derived from the human VH3 subclass. Preferably the heavy chain variable framework region is the product of or derived from human IGHV3-23. More preferably, the heavy chain variable framework region is the product of or derived from human IGHV3-23*04 (SEQ ID NO: 22). The heavy chain variable framework region comprises at least one amino acid modification from the corresponding framework region of the heavy chain variable region of the corresponding murine antibody comprising the amino acid sequence of SEQ ID NO: 18 or SEQ ID NO: 60.

[0044] In a preferred embodiment, the epitope binding region of the first polypeptide that binds to the CD3 protein complex comprises a light chain variable framework region that is the product of or derived from the human VK1 subclass or the human VK3 subclass. Preferably the light chain variable framework region is the product of or derived from human VK1-39 or VK3-20. More preferably the light chain variable framework region is the product of or derived from human IGKV1-39*01 (SEQ ID NO: 23) or IGKV3-20*01 (SEQ ID NO: 24). The light chain variable framework region comprises at least one amino acid modification from the corresponding framework region of the light chain variable region of the corresponding murine antibody comprising the amino acid sequence of SEQ ID NO: 19 or SEQ ID NO: 61.

[0045] In a preferred embodiment, the epitope binding region that binds to the CD3 protein complex comprises a humanized heavy chain variable domain having the back mutations selected from the group consisting of: I34M, V48I, A49G, R58N/Y, I69L, A71T and T73K (Kabat numbering) and a humanized light chain variable domain having the back mutations selected from the group consisting of: M4L, V33M, A34N. L46R, L47W, R66G, F71Y and P96F (Kabat numbering). More preferably, the epitope binding region that binds to the CD3 protein complex comprises a humanized heavy chain variable domain having the back mutations I34M, A49G and A71T (Kabat numbering) and a humanized light chain variable domain having the back mutations M4L, L46R, L47W and F71Y (Kabat numbering).

[0046] According to a further aspect of the present invention the epitope binding region that binds the CD3 protein complex of the hetero-dimeric immunoglobulin or fragment thereof, comprises a heavy chain variable region comprising the amino acid sequence of SEQ ID NO: 48, and a light chain variable region comprising the amino acid sequence of SEQ ID NO: 51; or wherein the epitope binding region that binds the CD3 protein complex comprises a heavy chain variable region comprising the amino acid sequence of SEQ ID NO: 49, and a light chain variable region comprising the amino acid sequence of SEQ ID NO: 51; or wherein the epitope binding region that binds the CD3 protein complex comprises a heavy chain variable region comprising the amino acid sequence of SEQ ID NO: 358, and a light chain variable region comprising the amino acid sequence of SEQ ID NO: 51; or wherein the epitope binding region that binds the CD3 protein complex comprises a heavy chain variable region comprising the amino acid sequence of SEQ ID NO: 101, and a light chain variable region comprising the amino acid sequence of SEQ ID NO: 105; or wherein the epitope binding region that binds the CD3 protein complex comprises a heavy chain variable region comprising the amino acid sequence of SEQ ID NO: 103, and a light chain variable region comprising the amino acid sequence of SEQ ID NO: 106; or wherein the epitope binding region that binds the CD3 protein complex comprises a heavy chain variable region comprising the amino acid sequence of SEQ ID NO: 104, and a light chain variable region comprising the amino acid sequence of SEQ ID NO: 106.

[0047] The CD3 protein complex comprises a number of subunits, for example, delta, epsilon and gamma. In a preferred embodiment, the epitope binding region that binds to the CD3 protein complex binds to the CD3 epsilon subunit.

[0048] An epitope binding region as described herein includes the combination of one or more heavy chain variable domains and one or more complementary light chain variable domains which together form a binding site which permits the specific binding of the hetero-dimeric immunoglobulin or fragment thereof to one or more epitopes. In an embodiment of the present invention, the epitope binding region of the first poly peptide comprises a FAB and the epitope binding region of the second polypeptide comprises a scFv. Alternatively, the epitope binding region of the first poly peptide comprises a scFv and the epitope binding region of the second polypeptide comprises a FAB.

[0049] In one embodiment, the epitope binding region that binds a disease associated antigen binds to HER2. The epitope binding region comprises a heavy chain variable framework region that is the product of or derived from the human VH3 subclass, preferably human VH3-23, more preferably human IGHV3-23*04 (SEQ ID NO: 22), and a light chain variable framework region that is the product of or derived from the human VK1 subclass, preferably human VK1-39, more preferably human IGKV1-39*01 (SEQ ID NO: 23).

[0050] In a preferred embodiment, the epitope binding region that binds the disease associated antigen HER2 comprises a heavy chain variable domain comprising the amino acid sequence of SEQ ID NO: 20 and a light chain variable domain comprising the amino acid sequence of SEQ ID NO: 21. In a further preferred embodiment, the epitope binding region that binds HER2 may comprise a heavy chain variable domain and a light chain variable domain joined by a G₄S linker forming a scFv fragment comprising the amino acid sequence of SEQ ID NO: 107. Preferably, the variable domain of the scFv fragment comprises a modification to abrogate binding to Protein A, wherein the amino acid substitution is 65S (Kabat numbering) and wherein the scFv fragment comprises the amino acid sequence of SEQ ID NO: 109 or wherein the amino acid substitution is 82aS (Kabat numbering) and wherein the scFv fragment comprises the amino acid sequence of SEQ ID NO: 111.

[0051] In particular wherein said Herceptin binding arm comprises a heavy chain variable region encoded by SEQ ID NO: 20 and a light chain variable region encoded by SEQ ID NO: 21.

[0052] In another embodiment, the epitope binding region that binds a disease associated antigen binds to CD38. The epitope binding region comprises a heavy chain variable framework region that is the product of or derived from the human VH3 subclass, preferably human VH3-23, more preferably human IGHV3-23*04 (SEQ ID NO: 22). The heavy chain variable framework region comprises at least one amino acid modification from the corresponding framework region of the heavy chain variable region of the corresponding murine antibody comprising the amino acid sequence of SEQ ID NO: 112 or 114 or 122. The epitope binding region further comprises a light chain variable framework region that is the product of or derived from the human VK1 subclass, preferably human VK1-39, more preferably human IGKV1-39*01 (SEQ ID NO: 23). The light chain variable framework region comprises at least one amino acid modification from the corresponding framework region of the light chain variable region of the corresponding murine antibody comprising the amino acid sequence of SEQ ID NO: 113 or 115 or 123.

[0053] In particular the CD38 binding polypeptide comprises variable heavy chain domain and variable light chain domain pair encoded by SEQ ID NOs: 116/117, 129/130, 133/134 and 135/136.

[0054] In one embodiment, the epitope binding region that binds a disease associated antigen binds to OX40. The epitope binding region comprises a heavy chain variable framework region that is the product of or derived from the human VH3 subclass, preferably human VH3-23, more preferably human IGHV3-23*04 (SEQ ID NO: 22). The heavy chain variable framework region comprises at least one amino acid modification from the corresponding framework region of the heavy chain variable region of the corresponding murine antibody comprising the amino acid sequence of SEQ ID NO: 139. The epitope binding region further comprises a light chain variable framework region that is the product of or derived from the human VK1 subclass, preferably human VK1-39, more preferably human IGKV1-39*01 (SEQ ID NO: 23). The light chain variable framework region comprises at least one amino acid modification from the corresponding framework region of the light chain variable region of the corresponding murine antibody comprising the amino acid sequence of SEQ ID NO: 140.

[0055] Most preferably, the humanized heavy chain variable domain comprises a modification to abrogate binding to Protein A comprising the substitution G65S or the substitution N82aS (Kabat numbering).

[0056] In particular the OX40 binding polypeptide comprises variable heavy chain domain and variable light chain domain pair encoded by SEQ ID NOs: 141/142, 278/280 and 279/281.

[0057] In one embodiment, the epitope binding region that binds a disease associated antigen binds to CD19. The epitope binding region comprises a heavy chain variable framework region that is the product of or derived from the human VH3 subclass, preferably human VH3-23, more preferably human IGHV3-23*04 (SEQ ID NO: 22) and most preferably comprises the amino acid sequence of SEQ ID NO: 296. The epitope binding region further comprises a light chain variable framework region that is the product of or derived from the human VK1 subclass, preferably human VK1-39, more preferably human IGKV1-39*01 (SEQ ID NO: 23) and most preferably comprises the amino acid sequence of SEQ ID NO: 297. In a preferred embodiment, the heavy chain variable domain comprises a modification to abrogate binding to Protein A comprising the substitution G65S or the substitution N82aS (Kabat numbering).

[0058] In particular the CD19 binding polypeptide comprises variable heavy chain domain and variable light chain domain pair encoded by SEQ ID NOs: 296/297.

[0059] In one embodiment, the epitope binding region that binds a disease associated antigen binds to CD20. The epitope binding region comprises a heavy chain variable framework region that is the product of or derived from the human VH3 subclass, preferably human VH3-23, more preferably human IGHV3-23*04 (SEQ ID NO: 22). The heavy chain variable framework region comprises at least one amino acid modification from the corresponding framework region of the heavy chain variable region of the corresponding murine antibody comprising the amino acid sequence of SEQ ID NO: 143. The epitope binding region further comprises a light chain variable framework region that is the product of or derived from the human VK1 subclass, preferably human VK1-39, more preferably human IGKV1-39*01 (SEQ ID NO: 23). The light chain variable framework region comprises at least one amino acid modification from the corresponding framework region of the light chain variable region of the corresponding murine antibody comprising the amino acid sequence of SEQ ID NO: 144.

[0060] Most preferably, the humanized heavy chain variable domain comprises a modification to abrogate binding to Protein A comprising the substitution G65S or the substitution N82aS (Kabat numbering).

[0061] In particular the EGFR binding polypeptide comprises variable heavy chain domain and variable light chain domain pair encoded by SEQ ID NOs: 143/144, 282/284, 283/285.

[0062] In one embodiment, the epitope binding region that binds a disease associated antigen binds to EGFR. The epitope binding region comprises a heavy chain variable framework region that is the product of or derived from the human VH3 subclass, preferably human VH3-23, more preferably human IGHV3-23*04 (SEQ ID NO: 22). The heavy chain variable framework region comprises at least one amino acid modification from the corresponding framework region of the heavy chain variable region of the corresponding murine antibody comprising the amino acid sequence of SEQ ID NO: 145. The epitope binding region further comprises a light chain variable framework region that is the product of or derived from the human VK1 subclass, preferably human VK1-39, more preferably human IGKV1-39*01 (SEQ ID NO: 23). The light chain variable framework region comprises at least one amino acid modification from the corresponding framework region of the light chain variable region of the corresponding murine antibody comprising the amino acid sequence of SEQ ID NO: 146.

[0063] Most preferably, the humanized heavy chain variable domain comprises a modification to abrogate binding to Protein A comprising the substitution G65S or the substitution N82aS (Kabat numbering).

[0064] In particular the CD20 binding polypeptide comprises variable heavy chain domain and variable light chain domain pair encoded by SEQ ID NOs: 145/146, 286/288, 287/289, 290/291, 292/294.

[0065] In one embodiment, the epitope binding region that binds a disease associated antigen binds to IgE. The epitope binding region comprises a heavy chain variable framework region that is the product of or derived from the human VH3 subclass, preferably human VH3-23, more preferably human IGHV3-23*04 (SEQ ID NO: 22). The heavy chain variable framework region comprises at least one amino acid modification from the corresponding framework region of the heavy chain variable region of the corresponding humanized antibody comprising the amino acid sequence of SEQ ID NO: 298 or the corresponding murine antibody comprising the amino acid sequence of SEQ ID NO: 304. The epitope binding region further comprises a light chain variable framework region that is the product of or derived from the human VK1 subclass, preferably human VK1-39, more preferably human IGKV1-39*01 (SEQ ID NO: 23). The light chain variable framework region comprises at least one amino acid modification from the corresponding framework region of the light chain variable region of the corresponding humanized antibody comprising the amino acid sequence of SEQ ID NO: 299 or the corresponding murine antibody comprising the amino acid sequence of SEQ ID NO: 305.

[0066] Most preferably, the heavy chain variable domain comprises a modification to abrogate binding to Protein A comprising the substitution G65S or the substitution N82aS (Kabat numbering).

[0067] In particular the IgE binding polypeptide comprises variable heavy chain domain and variable light chain domain pair encoded by SEQ ID NOs, 298/299, 300/302, 301/303, 304/305, 306/308, 307/309.

[0068] Anti-CD3 antibodies have been found to trigger toxicity by both direct and indirect mechanisms. Indirect mechanisms are mediated by the Fc region of the CD3 antibody which acts with the Fc receptor expressing immune cells and lead to transient T cell activation and cytokine release. Therefore in order to improve the safety of the hetero-dimeric immunoglobulins or fragment thereof as described herein, the immunoglobulin constant region of the first and/or second polypeptide has reduced or no binding for effector immune cells and/or complement C1q. Preferably, the immunoglobulin constant region is engineered to abrogate Fc receptor binding in the lower hinge region. More preferably the immunoglobulin constant region of the first and/or second polypeptide comprises the substitution(s) L234A and/or L235A (EU numbering). Most preferably, the immunoglobulin constant region of the first and/or second polypeptide comprises the substitutions L234A and L235A (EU numbering).

[0069] In another aspect, the disclosure of the present invention also describes a hetero-dimeric immunoglobulin or fragment thereof wherein the epitope binding region binds to the CD3 epsilon subunit of the CD3 protein complex and comprises a FAB having a FAB thermo-stability superior to the FAB thermo-stability of the OKT3 chimera comprising a heavy chain variable domain of amino acid sequence of SEQ ID NO: 25 and a light chain variable domain of amino acid sequence of SEQ ID NO: 26, as measured by Differential Scanning Calorimetry (DSC) as described in FIG. 9.

[0070] In further aspect, the present invention provides a hetero-dimeric immunoglobulin or fragment thereof as described herein wherein one epitope binding region binds to the CD3 epsilon subunit of the CD3 protein complex and the other epitope binding region that binds a disease associated antigen, binds HER2. The potency of such a hetero-dimeric immunoglobulin or fragment thereof to redirect T-cell killing can be measured in an in vitro assay using a flow cytometry method (RDL-FACS) or a colorimetric based method (RDL-MTS) on cell lines expressing HER2 such as JIMT-1, BT-474 and MDA-MB-231, as described in the Examples.

[0071] In one embodiment the hetero-dimeric immunoglobulin or fragment thereof that binds to CD3 epsilon and HER2 kills JIMT-1 cells with a potency of 21 pM or less. Alternatively, the hetero-dimeric immunoglobulin or fragment thereof also kills BT-474 cells with a potency of 2 pM or less. In addition, the hetero-dimeric immunoglobulin or fragment thereof also kills MDA-MB-231 cells with a potency of 0.2 nM or less. The cytotoxicity of all cell lines was measured in a RDL assay performed with human PBMCs at an effector:target cell ratio of 10:1 over 48 h. Furthermore, this hetero-dimeric immunoglobulin or fragment thereof shows a potent anti-tumour effect wherein tested in vivo in a JIMT-1/PBMC xenograft model. Preferably the hetero-dimeric immunoglobulin or fragment thereof kills JIMT-1 cells at 0.05 mg/kg in a JIMT-1 cell xenograft.

[0072] In a preferred embodiment, the present invention provides hetero-dimeric immunoglobulin or fragment thereof binding to:

[0073] i) the CD3 protein complex and HER2, wherein the first polypeptide has an amino acid sequence of SEQ ID NO: 159 and is assembled with a light chain of amino acid sequence of SEQ ID NO: 47 and binds CD3 epsilon, and wherein the second polypeptide has an amino acid sequence of SEQ ID NO: 160 and binds HER2;

[0074] ii) the CD3 protein complex and HER2, wherein the first polypeptide has an amino acid sequence of SEQ ID NO: 161 and is assembled with a cognate light chain of amino acid sequence of SEQ ID NO: 3 and binds HER2, and wherein the second polypeptide has an amino acid sequence of SEQ ID NO: 162 and binds CD3 epsilon;

[0075] iii) the CD3 protein complex and HER2, wherein the first polypeptide has an amino acid sequence of SEQ ID NO: 163 and is assembled with a light chain of amino acid sequence of SEQ ID NO: 47 and binds CD3 epsilon, and wherein the second polypeptide has an amino acid sequence of SEQ ID NO: 164 and binds HER2;

[0076] iv) the CD3 protein complex and HER2, wherein the first polypeptide has an amino acid sequence of SEQ ID NO: 165 and is assembled with a light chain of amino acid sequence of SEQ ID NO: 166 and binds CD3 epsilon, and wherein the second polypeptide has an amino acid sequence of SEQ ID NO: 167 and binds HER2;

[0077] v) the CD3 protein complex and HER2, wherein the first polypeptide has an amino acid sequence of SEQ ID NO: 168 and is assembled with a light chain of amino acid sequence of SEQ ID NO: 89 and binds CD3 epsilon, and wherein the second polypeptide has an amino acid sequence of SEQ ID NO: 167 and binds HER2;

[0078] vi) the CD3 protein complex and CD38, wherein the first polypeptide has an amino acid sequence of SEQ ID NO: 169 and is assembled with a cognate light chain of amino acid sequence of SEQ ID NO: 119 and binds CD38, and wherein the second polypeptide has an amino acid sequence of SEQ ID NO: 162 and binds CD3 epsilon;

[0079] vii) the CD3 protein complex and CD38, wherein the first polypeptide has an amino acid sequence of SEQ ID NO: 170 and is assembled with a cognate light chain of amino acid sequence of SEQ ID NO: 138 and binds CD38, and wherein the second polypeptide has an amino acid sequence of SEQ ID NO: 171 and binds CD3 epsilon;

[0080] viii) the CD3 protein complex and CD38, wherein the first polypeptide has an amino acid sequence of SEQ ID NO: 176 and is assembled with a cognate light chain of amino acid sequence of SEQ ID NO: 119 and binds CD38, and wherein the second polypeptide has an amino acid sequence of SEQ ID NO: 177 and binds CD3 epsilon;

[0081] ix) the CD3 protein complex and CD38, wherein the first polypeptide has an amino acid sequence of SEQ ID NO: 178 and is assembled with a cognate light chain of amino acid sequence of SEQ ID NO: 128 and binds CD38, and wherein the second polypeptide has an amino acid sequence of SEQ ID NO: 179 and binds CD3 epsilon;

[0082] x) the CD3 protein complex and OX40 wherein the first polypeptide has an amino acid sequence of SEQ ID NO: 172 and is assembled with a cognate light chain of amino acid sequence of SEQ ID NO: 173 and binds OX40, and wherein the second polypeptide has an amino acid sequence of SEQ ID NO: 162 and binds CD3 epsilon;

[0083] xi) the CD3 protein complex and EGFR wherein the first polypeptide has an amino acid sequence of SEQ ID NO: 174 and is assembled with a cognate light chain of amino acid sequence of SEQ ID NO: 175 and binds EGFR, and wherein the second polypeptide has an amino acid sequence of SEQ ID NO: 171 and binds CD3 epsilon;

[0084] xii) the CD3 protein complex and CD20, wherein the first polypeptide has an amino acid sequence of SEQ ID NO: 180 and is assembled with a cognate light chain of amino acid sequence of SEQ ID NO: 181 and binds CD20, and wherein the second polypeptide has an amino acid sequence of SEQ ID NO: 177 and binds CD3 epsilon.

[0085] In a further embodiment, the present invention provides hetero-dimeric immunoglobulin or fragment thereof binding to: the CD3 protein complex and HER2, wherein the first polypeptide has an amino acid sequence of SEQ ID NO: 310 and is assembled with a light chain of amino acid sequence of SEQ ID NO: 3 and binds HER2, and wherein the second polypeptide has an amino acid sequence of SEQ ID NO: 311 and binds CD3 epsilon; the CD3 protein complex and CD38, wherein the first polypeptide has an amino acid sequence of SEQ ID NO: 312 and is assembled with a light chain of amino acid sequence of SEQ ID NO: 132 and binds CD38, and wherein the second polypeptide has an amino acid sequence of SEQ ID NO: 311 and binds CD3 epsilon; the CD3 protein complex and CD38, wherein the first polypeptide has an amino acid sequence of SEQ ID NO: 313 and is assembled with a light chain of amino acid sequence of SEQ ID NO: 138 and binds CD38, and wherein the second polypeptide has an amino acid sequence of SEQ ID NO: 311 and binds CD3 epsilon; the CD3 protein complex and OX40, wherein the first polypeptide has an amino acid sequence of SEQ ID NO: 314 and is assembled with a light chain of amino acid sequence of SEQ ID NO: 315 and binds OX40, and wherein the second polypeptide has an amino acid sequence of SEQ ID NO: 311 and binds CD3 epsilon; the CD3 protein complex and OX40, wherein the first polypeptide has an amino acid sequence of SEQ ID NO: 316 and is assembled with a light chain of amino acid sequence of SEQ ID NO: 317 and binds OX40, and wherein the second polypeptide has an amino acid sequence of SEQ ID NO: 311 and binds CD3 epsilon; the CD3 protein complex and CD20, wherein the first polypeptide has an amino acid sequence of SEQ ID NO: 318 and is assembled with a light chain of amino acid sequence of SEQ ID NO: 319 and binds CD20, and wherein the second polypeptide has an amino acid sequence of SEQ ID NO: 311 and binds CD3 epsilon; the CD3 protein complex and CD20, wherein the first polypeptide has an amino acid sequence of SEQ ID NO: 320 and is assembled with a light chain of amino acid sequence of SEQ ID NO: 321 and binds CD20, and wherein the second polypeptide has an amino acid sequence of SEQ ID NO: 311 and binds CD3 epsilon; the CD3 protein complex and EGFR, wherein the first polypeptide has an amino acid sequence of SEQ ID NO: 322 and is assembled with a light chain of amino acid sequence of SEQ ID NO: 323 and binds EGFR, and wherein the second polypeptide has an amino acid sequence of SEQ ID NO: 311 and binds CD3 epsilon; the CD3 protein complex and EGFR, wherein the first polypeptide has an amino acid sequence of SEQ ID NO: 324 and is assembled with a light chain of amino acid sequence of SEQ ID NO: 325 and binds EGFR, and wherein the second polypeptide has an amino acid sequence of SEQ ID NO: 311 and binds CD3 epsilon; the CD3 protein complex and EGFR, wherein the first polypeptide has an amino acid sequence of SEQ ID NO: 326 and is assembled with a light chain of amino acid sequence of SEQ ID NO: 327 and binds EGFR, and wherein the second polypeptide has an amino acid sequence of SEQ ID NO: 311 and binds CD3 epsilon; the CD3 protein complex and EGFR, wherein the first polypeptide has an amino acid sequence of SEQ ID NO: 328 and is assembled with a light chain of amino acid sequence of SEQ ID NO: 329 and binds EGFR, and wherein the second polypeptide has an amino acid sequence of SEQ ID NO: 311 and binds CD3 epsilon; the CD3 protein complex and CD19, wherein the first polypeptide has an amino acid sequence of SEQ ID NO: 330 and is assembled with a light chain of amino acid sequence of SEQ ID NO: 331 and binds CD19, and wherein the second polypeptide has an amino acid sequence of SEQ ID NO: 311 and binds CD3 epsilon; the CD3 protein complex and IgE, wherein the first polypeptide has an amino acid sequence of SEQ ID NO: 332 and is assembled with a light chain of amino acid sequence of SEQ ID NO: 333 and binds IgE, and wherein the second polypeptide has an amino acid sequence of SEQ ID NO: 311 and binds CD3 epsilon; the CD3 protein complex and IgE, wherein the first polypeptide has an amino acid sequence of SEQ ID NO: 334 and is assembled with a light chain of amino acid sequence of SEQ ID NO: 335 and binds IgE, and wherein the second polypeptide has an amino acid sequence of SEQ ID NO: 311 and binds CD3 epsilon; the CD3 protein complex and IgE, wherein the first polypeptide has an amino acid sequence of SEQ ID NO: 336 and is assembled with a light chain of amino acid sequence of SEQ ID NO: 337 and binds IgE, and wherein the second polypeptide has an amino acid sequence of SEQ ID NO: 311 and binds CD3 epsilon; the CD3 protein complex and IgE, wherein the first polypeptide has an amino acid sequence of SEQ ID NO: 338 and is assembled with a light chain of amino acid sequence of SEQ ID NO: 339 and binds IgE, and wherein the second polypeptide has an amino acid sequence of SEQ ID NO: 311 and binds CD3 epsilon; the CD3 protein complex and OX40, wherein the first polypeptide has an amino acid sequence of SEQ ID NO: 340 and is assembled with a light chain of amino acid sequence of SEQ ID NO: 173 and binds OX40, and wherein the second polypeptide has an amino acid sequence of SEQ ID NO: 311 and binds CD3 epsilon; the CD3 protein complex and CD20, wherein the first polypeptide has an amino acid sequence of SEQ ID NO: 341 and is assembled with a light chain of amino acid sequence of SEQ ID NO: 181 and binds CD20, and wherein the second polypeptide has an amino acid sequence of SEQ ID NO: 311 and binds CD3 epsilon; the CD3 protein complex and EGFR, wherein the first polypeptide has an amino acid sequence of SEQ ID NO: 342 and is assembled with a light chain of amino acid sequence of SEQ ID NO: 175 and binds EGFR, and wherein the second polypeptide has an amino acid sequence of SEQ ID NO: 311 and binds CD3 epsilon; the CD3 protein complex and EGFR, wherein the first polypeptide has an amino acid sequence of SEQ ID NO: 343 and is assembled with a light chain of amino acid sequence of SEQ ID NO: 344 and binds EGFR, and wherein the second polypeptide has an amino acid sequence of SEQ ID NO: 311 and binds CD3 epsilon; the CD3 protein complex and IgE, wherein the first polypeptide has an amino acid sequence of SEQ ID NO: 345 and is assembled with a light chain of amino acid sequence of SEQ ID NO: 346 and binds IgE, and wherein the second polypeptide has an amino acid sequence of SEQ ID NO: 311 and binds CD3 epsilon; the CD3 protein complex and IgE, wherein the first polypeptide has an amino acid sequence of SEQ ID NO: 347 and is assembled with a light chain of amino acid sequence of SEQ ID NO: 348 and binds IgE, and wherein the second polypeptide has an amino acid sequence of SEQ ID NO: 311 and binds CD3 epsilon.

[0086] In accordance with a further aspect of the present invention the hetero-dimeric immunoglobulin or fragment thereof wherein said CD3 binding polypeptide comprises at least one or a combination of a heavy and light chain variable regions selected from the group: SEQ ID NOs: 48/51, 49/51, 101/105, 103/106, 104/106, 358/51 and wherein said disease associated antigen binding polypeptide comprises at least one or a combination of a heavy and light chain variable regions selected from the group: SEQ ID NOs: 20/21, 116/117, 129/130, 133/134, 135/136, 139/140, 141/142, 278/280, 279/281, 143/144, 282/284, 283/285, 296/297, 145/146, 286/288, 287/289, 290/291, 292/294, 293/295, 298/299, 300/302, 301/303, 304/305, 306/308, 307/309.

[0087] As discussed above for bispecific antibody generation, there is a need to efficiently produce anti-human CD3 based heavy chain hetero-dimers free of anti-human CD3 homo-dimers wherein the secreted bispecific antibody product is readily isolated from the cell culture supernatant from a recombinant mammalian host cell line. To this effect, a Protein A based differential purification technique can be used to isolate hetero-dimeric immunoglobulins or fragments thereof encompassing the variable domain subclass of VH3, wherein the Protein A binding site in at least one but preferably both VH3 based epitope binding regions is abrogated. Therefore, in another aspect, the present invention provides an in vitro method for the production of a hetero-dimeric immunoglobulin or fragment thereof as described herein, comprising the following steps: ia) preparing a DNA vector encoding a heavy chain of the first polypeptide and a DNA vector encoding a heavy chain of the second polypeptide wherein one or both DNA vectors or a third DNA vector optionally encode a common light chain or a light chain that assembles with a heavy chain of the first or second polypeptide; or ib) preparing one DNA vector encoding heavy chains of the first and second polypeptides wherein the DNA vector optionally encodes a common light chain or a light chain that assembles with a heavy chain of the first or second polypeptide; and wherein said DNA vectors are suitable for transient or stable expression in a mammalian host cell; ii) transfecting or co-transfecting the DNA vector(s) from (i) in a mammalian host cell line; iii) culturing the transfected cell line or stably selected clone therefrom and harvesting the cell culture supernatant; iv) contacting the cell culture supernatant on a Protein A affinity chromatography resin; v) eluting and collecting the hetero-dimeric immunoglobulin of interest.

[0088] Preferably the hetero-dimeric immunoglobulin or fragment thereof found in the purified material from step (v) is at least 95% pure. More preferably the hetero-dimeric immunoglobulin or fragment thereof found in the purified material from step (v) is at least 96% pure. Even more preferably the hetero-dimeric immunoglobulin or fragment thereof found in the purified material from step (v) is at least 97%. Purity of the hetero-dimeric immunoglobulin or fragment thereof found in the purified material can be measured by capillary electrophoresis.

[0089] In accordance with a further aspect of the present invention there is provided a polypeptide comprising at least one CDRs from the groups: SEQ ID NOs: 224-229, 230-235 and 352-357; or combinations of heavy chain variable domain and light chain variable domain pairs selected from the group: SEQ ID NOs: 122/123, 124/125, 129/130, 135/136, 133/134 104/106; and heavy and light chain sequence pair selected from the group: 126/127 or 128, 131/132, 137/138, 359/360.

### BRIEF DESCRIPTION OF THE FIGURES

[0090] FIG. 1: Schematic diagram of the preferred differential affinity purification technique using Protein A. None of the heavy chains encompass a VH3 based antigen binding site. Legend: [(A+)] means a functional Protein A binding site and [(A−)] means a nonfunctional Protein A binding site. pH of elution is indicated.

[0091] FIG. 2A-F: Schematic diagrams illustrating the problems faced when purifying hetero-dimers of heavy chains encompassing one or more VH3 domains using differential protein A chromatography. Examples of solutions based on mutating the Protein A binding site within at least one VH3 domain of the hetero-dimer are shown. FIG. 2A: Problem faced when the hetero-dimer of heavy chains encompasses a VH3 domain within the heavy chain that does not bind Protein A in its Fc region. FIG. 2B: Solution to the purification problem described in FIG. 2A, the heavy chain of the hetero-dimer that does not bind Protein A in its Fc region encompasses a VH3 domain which has been mutated to abrogate its Protein A binding site. FIG. 2C: Alternative solution to the problem described in FIG. 2A, the hetero-dimer encompasses only one VH3 domain and the hetero-dimer is engineered to have its VH3 domain located on the heavy chain that binds Protein A in its Fc region (VH3 domain relocation strategy as a solution). FIG. 2D: Problem faced when both heavy chains of the hetero-dimer encompass a VH3 domain. FIG. 2E: Solution to the purification problem described in FIG. 2D, the heavy chain of the hetero-dimer that does not bind Protein A in its Fc region encompasses a VH3 domain which has been mutated to abrogate its Protein A binding site. FIG. 2F: Alternative solution to the purification problem described in FIG. 2D, each VH3 domain has its Protein A binding site abrogated. Boxed species indicated that these species co-elute during the differential Protein A chromatography process. pH values A and B differ by about one pH unit and allow efficient separation of the species that binds Protein A. Typically pH values for pH A and pH B are 4 and 3, respectively. Legend for all figures: [(A+)] means a functional Protein A binding site and [(A−)] means a nonfunctional Protein A binding site.

[0092] FIG. 3: Protein A gradient mode chromatography traces for Fc 133 (HiTrap™ MabSelect SuRe™ Protein A column). Plots of absorbance at 280 nm vs. total volume of mobile phase are shown as solid line. Plots of mobile phase pH and percentage of eluent buffer (B) present in mobile phase are shown as dashed and dotted-dashed lines, respectively.

[0093] FIG. 4A-C: Protein A gradient mode chromatography traces. Plots of absorbance at 280 nm vs. total volume of mobile phase are shown as solid line. Plots of mobile phase pH and percentage of eluent buffer (B) present in mobile phase are shown as dashed and dotted-dashed lines, respectively. FIG. 4A: Anti-HER2 FAB-Fc 133 (HiTrap™ MabSelect SuRe™ Protein A column). FIG. 4B: Anti-HER2 scFv-Fc 133 (HiTrap™ MabSelect SuRe™ Protein A column). FIG. 4C: Anti-HER2 FAB (HiTrap™ MabSelect SuRe™ Protein A column and HiTrap™ MabSelect™ Protein A column).

[0094] FIG. 5: Representative amino acid sequences for each of the seven known human VH framework subclasses. Sequences were aligned according to the Kabat numbering. Positions in the human VH3-23 framework subclass that interact with the domain D of Protein A are shown in bold.

[0095] FIG. 6A-I: Protein A gradient mode chromatography traces (HiTrap™ MabSelect™ Protein A column). Plots of absorbance at 280 nm vs. total volume of mobile phase are shown as solid line. Plots of mobile phase pH and percentage of eluent buffer (B) present in mobile phase are shown as dashed and dotted-dashed lines, respectively. FIG. 6A: Anti-HER2 FAB. FIG. 6B: Anti-HER2 FAB T57A. FIG. 6C: Anti-HER2 FAB T57E. FIG. 6D: Anti-HER2 FAB G65S. FIG. 6E: Anti-HER2 FAB R66Q. FIG. 6F: Anti-HER2 FAB T68V. FIG. 6G: Anti-HER2 FAB Q81E. FIG. 6H: Anti-HER2 FAB N82aS. FIG. 6I: Anti-HER2 FAB R19G/T57A/Y59A.

[0096] FIG. 7: Equilibrium dissociation constants (KD) of selected anti-HER2 FAB variants for the HER2 antigen.

[0097] FIG. 8A-D: Protein A gradient mode chromatography traces (HiTrap™ MabSelect SuRe™ Protein A column). Plots of absorbance at 280 nm vs. total volume of mobile phase are shown as solid line. Plots of mobile phase pH and percentage of eluent buffer (B) present in mobile phase are shown as dashed and dotted-dashed lines, respectively. FIG. 8A: Anti-HER2 scFv(G65S)-Fc 133. FIG. 8B: Anti-HER2 scFv(N82aS)-Fc 133. FIG. 8C: Anti-HER2 FAB(G65S)-Fc 133. FIG. 8D: Anti-HER2 FAB(N82aS)-Fc 133.

[0098] FIG. 9A-F: These figures all relate to OKT3 humanization on stable human frameworks. FIG. 9A-C: Summary of humanized candidates formatted as human IgG1 antibodies. HPB-ALL staining relative to the chimeric OKT3 antibody: (−) indicates no binding, (+) weaker binding, (++) moderate binding and (+++) similar binding. FIG. 9D: DSC profiles of selected antibodies of candidates. FIG. 9E: Summary of humanized candidates formatted as scFv-Fc fusions. HPB-ALL staining relative to the chimeric OKT3 antibody: (−) indicates no binding, (+) weaker binding, (++) moderate binding and (+++) similar binding. FIG. 9F: DSC profiles of selected scFv-Fc candidates.

[0099] FIG. 10A-B: These figures all relate to SP34 humanization on stable human frameworks. FIG. 10A: Summary of humanized candidates formatted as human IgG1 antibodies. FIG. 10B: Summary of humanized candidates formatted as scFv-Fc fusion proteins (Fc of human IgG1 isotype). SPR data relative to the chimeric SP34 antibody for human and cynomolgus monkey CD3 epsilon 1-26_Fc fusion proteins: (−) indicates no binding, (+) weaker binding, (++) moderate binding, strong but not similar binding (+++), and (++++) similar binding.

[0100] FIG. 11A-J: These figures all relate to anti-human CD38 antibodies. FIG. 11A: Antibody-antigen interaction measured by SPR between the chimeric HB-7 antibody and the human CD38 antigen. A CM5 sensor chip was covalently coupled with protein G and 200 RUs of chimeric HB-7 antibody were captured. Human CD38 protein (human CD38 extracellular domain with a poly-histidine tag) was injected at 125, 31, 7.8, 3.9, 1.9, 1 and 0.5 nM at a flow rate of 30 μl/min in HBS-P. FIG. 11B: Antibody-antigen interaction measured by SPR between the humanized HB-7 best-fit antibody and the human CD38 antigen. A CM5 sensor chip was covalently coupled with protein G and 200 RUs of humanized HB-7 best-fit antibody were captured. Human CD38 protein (human CD38 extracellular domain with a poly-histidine tag) was injected at 50, 25, 12.5, 6.25 and 0.39 nM at a flow rate of 30 μl/min in HBS-P. FIG. 11C: Antibody-antigen interaction measured by SPR between the humanized 9G7 best-fit antibody and the human CD38 antigen. A CM5 sensor chip was covalently coupled with protein G and 200 RUs of humanized 9G7 best-fit antibody were captured. Human CD38 protein (human CD38 extracellular domain with a poly-histidine tag) was injected at 25, 12.5, 6.25, 3.12, 1.56, 0.78, 0.39, 0.19, and 0.1 nM at a flow rate of 30 μl/min in HBS-P. FIG. 11D: Antibody-antigen interaction measured by SPR between the humanized 9G7 best-framework antibody and the human CD38 antigen. A CM5 sensor chip was covalently coupled with protein G and 200 RUs of humanized 9G7 best-framework antibody were captured. Human CD38 protein (human CD38 extracellular domain with a poly-histidine tag) was injected at 50, 25, 12.5, 6.25, 3.12, 1.56, 0.78, 0.39, 0.19, and 0.1 nM at a flow rate of 30 μl/min in HBS-P. FIG. 11E: Antibody-antigen interaction measured by SPR between the human 767 antibody and the human CD38 antigen. A CM5 sensor chip was covalently coupled with protein G and 200 RUs of human 767 antibody were captured. Human CD38 protein (human CD38 extracellular domain with a poly-histidine tag) was injected at 500, 250, 125, 62.5, 31.25, and 15.6 nM at a flow rate of 30 μl/min in HBS-P. Affinity was obtained from a plot of the equilibrium response (Req) vs. analyte concentration (C) according to the following equation: Req=KA*C*Rmax/(KA*C*n+1), concentration at 50% saturation is KD. All SPR data are expressed as number of response units (abbreviated RU; Y axis) vs. time (X axis). FIG. 11F: DSC profiles of chimeric HB-7 and humanized HB-7 best-fit antibodies. FIG. 11G: DSC profiles of chimeric 9G7 and humanized 9G7 best-fit antibodies. FIG. 11H: DSC profiles of humanized 9G7 best-framework antibody. FIG. 11I: DSC profiles of human clone 767 antibody. FIG. 11J: summary table for the 9G7 humanized antibodies.

[0101] FIG. 12A-C: Schematic diagram of the BEAT HER2/CD3 antibodies in alternative formats. FIG. 12A: BEAT HER2/CD3-1 (format A) and BEAT HER2/CD3-2 (format B) antibodies. FIG. 12B: BEAT HER2/CD3-3 (format C) and BEAT HER2/CD3(SP34) (format D) antibodies. FIG. 12C: BEAT HER2/CD3(SP34-Kappa1) (format E) antibody. Legend: [(A+)] means functional Protein A binding site. [(A−)] means nonfunctional Protein A binding site.

[0102] FIG. 13: Protein A purification profile of BEAT HER2/CD3-1 antibody (Absorbance trace at 280 nm). Column: 1 ml MabSelect SuRe. Flow rate: 1 mL/min. Running buffer: 0.2 M NaH₂PO₄ pH 6. Elution buffer No 1: 20 mM Na Acetate pH 4 (20 ml). Elution buffer No 2: 0.1 M Glycine pH 3 (20 ml). Neutralization: 1/10 vol. of 1M Tris pH 8.

[0103] FIG. 14: Capillary Electrophoresis profile of BEAT HER2/CD3-1 antibody preparations.

[0104] FIG. 15A: SDS-PAGE analysis of N82aS substituted BEAT HER2/CD3-1 antibody. FIG. 15B: SDS-PAGE analysis of N82aS non substituted BEAT HER2/CD3-1 antibody variant. Legend: [(A+)] means a functional Protein A binding site and [(A−)] means a nonfunctional Protein A binding site. pH of elution is indicated.

[0105] FIG. 16A: Antibody-antigen interaction measured by SPR between the BEAT HER2/CD3-1 antibody and the human CD3 epsilon antigen. A CM5 sensor chip was covalently coupled with 7400 RUs of the human CD3 gamma-epsilon-Fc fusion protein. BEAT HER2/CD3-1 antibody was injected at 5000, 2500, 1250, 625, 312.5 and 156.25 nM at a flow rate of 10 μl/min in HBS-P. Data are expressed as number of response units (abbreviated RU; Y axis) vs. time (X axis). Affinity was obtained from a plot of the equilibrium response (Req) vs. analyte concentration (C) according to the following equation: Req=KA*C*Rmax/(KA*C*n+1), concentration at 50% saturation is KD. FIG. 16B: Antibody-antigen interaction measured by SPR between the BEAT HER2/CD3-1 antibody and the human HER2 antigen. A CM5 sensor chip was covalently coupled protein G and 150 RUs of BEAT HER2/CD3-1 antibody were captured. HER2-his was injected at 1000, 333, 111, 37, 12, 4.1, 1.4, 0.5 and 0.15 nM at a flow rate of 30 μl/min in HBS-P. Data are expressed as number of response units (abbreviated RU; Y axis) vs. time (X axis). FIG. 16C: DSC profiles of BEAT HER2/CD3-1 and -2 antibodies shown in profiles A and B, respectively.

[0106] FIG. 17A-G: Examples of T cell redirected killing by the BEAT HER2/CD3 antibodies. Readout: RDL-MTS method. Effector cells:human PBMCs. Effector cells-to-targeted cells ratio of 10:1. Means of three donors with 48 h incubation. Antibody concentrations are shown in nM. FIG. 17A: BEAT HER2/CD3-1 and BEAT HER2/CD3-2 antibodies, target cells: BT-474. FIG. 17B: BEAT HER2/CD3-1 and BEAT HER2/CD3-2 antibodies, target cells: JIMT-1. FIG. 17C: BEAT HER2/CD3-1 and BEAT HER2/CD3-2 antibodies, target cells: MDA-MB-231. FIG. 17D: BEAT HER2/CD3(SP34) antibody, target cells: NCI-N87. FIG. 17E: BEAT HER2/CD3(SP34) antibody, target cells: HT-1080. FIG. 17F: BEAT HER2/CD3(SP34-Kappa1) antibody, target cells: NCI-N87. FIG. 17G: BEAT HER2/CD3(SP34-Kappa1) antibody, target cells: HT-1080.

[0107] FIG. 18A-C: JIMT-1 xenografts with human PBMC supplementation. FIG. 18A: Human PBMC's do not interfere with tumor growth. FIG. 18B-C: Tumor volumes (mm³) for BEAT HER2/CD3-1 treated and non-treated mice, four human PBMC donors, cohorts of five mice.

[0108] FIG. 19: Schematic diagram of the BEAT CD38-HB7bestfit/CD3 (format A) and BEAT CD38-767/CD3 (format B) antibodies. [(A+)] means functional Protein A binding site. [(A−)] means nonfunctional Protein A binding site.

[0109] FIG. 20A: Antibody-antigen interaction measured by SPR between the BEAT CD38-HB7bestfit/CD3 antibody and the human CD38 antigen. A CM5 sensor chip was covalently coupled with protein G and 200 RUs of BEAT CD38-HB7bestfit/CD3 antibody were captured. Human CD38 protein (poly-histidine tagged protein) was injected at 50, 25, 12.5, 6.25 and 0.39 nM at a flow rate of 30 μl/min in HBS-P. Data are expressed as number of response units (abbreviated RU; Y axis) vs. time (X axis). FIG. 20B: BEAT CD38-HB7bestfit/CD3 antibody DSC profile.

[0110] FIG. 21: Example of T cell redirected killing by the BEAT CD38-HB7bestfit/CD3 antibody. Readout: RDL-FACS method. Effector cells: purified human T cells. Effector cells-to-targeted cells ratio of 10:1. Mean of two donors with 48 h incubation. Target cells: RPMI 8226. Antibody concentration is shown in nM.

[0111] FIG. 22: Example of T cell redirected killing by the BEAT CD38-767/CD3(SP34) antibody. Readout: RDL-FACS method. Effector cells:human PBMC's. Effector cells-to-targeted cells ratio of 10:1. Mean of three donors with 24 h incubation. Target cells: Daudi. Antibody concentration is shown in nM.

[0112] FIG. 23: Schematic diagram of the BEAT OX40/CD3antibody. Legend: [(A+)] means functional Protein A binding site. [(A−)] means nonfunctional Protein A binding site.

[0113] FIG. 24: Example of T cell redirected killing by the BEAT OX40/CD3antibody. Readout: RDL-MTS method. Effector cells:Human PBMCs. Effector cells-to-targeted cells ratio of 20:1. Mean of three donors with 48 h incubation. Target cells: recombinant stable CHO[OX40] cells. Antibody concentration is shown in nM.

[0114] FIG. 25: Schematic diagram of the BEAT EGFR/CD3 antibody. Legend: [(A+)] means functional Protein A binding site. [(A−)] means nonfunctional Protein A binding site.

[0115] FIG. 26: Example of T cell redirected killing by the BEAT EGFR/CD3antibody. Readout: RDL-MTS method. Effector cells:Human PBMCs. Effector cells-to-targeted cells ratio of 10:1. Mean of four donors with 48 h incubation. Target cells: HT-29 cells. Antibody concentration is shown in nM.

[0116] FIG. 27: Schematic diagram of the BEAT CD38-HB7bestfit/CD3(SP34) (format A) and BEAT CD38-9G7bestfit/CD3(SP34-Kappa2) (format B) antibodies. [(A+)] means functional Protein A binding site.

[0117] FIG. 28: Example of T cell redirected killing by the BEAT CD38-HB7bestfit/CD3(SP34) antibody. Readout: RDL-FACS method. Effector cells:Human PBMCs. Effector cells-to-targeted cells ratio of 10:1. Mean of three donors with 24 h incubation. Target cells: Daudi cells. Antibody concentration is shown in nM.

[0118] FIG. 29: Antibody-antigen interaction measured by SPR between the BEAT CD38-9G7bestfit/CD3(SP34-Kappa2) antibody and the human CD3 epsilon 1-26_Fc fusion protein. A CM5 sensor chip was covalently coupled with 500 RUs of the human CD3 epsilon 1-26_Fc fusion protein. BEAT CD38-9G7bestfit/CD3(SP34-Kappa2) antibody was injected at 50, 25, 12.5, 6.2, 3.1, 0.8 and 0.4 nM at a flow rate of 30 μl/min in HBS-P. Data are expressed as number of response units (abbreviated RU; Y axis) vs. time (X axis).

[0119] FIG. 30: Example of T cell redirected killing by the BEAT CD38/CD3(SP34-Kappa2) antibody. Readout: RDL-FACS method. Effector cells:Human PBMCs. Effector cells-to-targeted cells ratio of 10:1. Mean of three donors with 24 h incubation. Target cells: Daudi cells. Antibody concentration is shown in nM.

[0120] FIG. 31: Schematic diagram of the BEAT CD20/CD3(SP34) antibody. [(A+)] means functional Protein A binding site.

[0121] FIG. 32: Example of T cell redirected killing by the BEAT CD20/CD3(SP34) antibody. Readout: RDL-FACS method. Effector cells:Human PBMCs. Effector cells-to-targeted cells ratio of 10:1. Means of three donors with 24 h incubation. Target cells: Daudi cells. Antibody concentration is shown in nM.

### DETAILED DESCRIPTION OF THE INVENTION

[0122] The present invention relates generally to novel hetero-dimeric immunoglobulins that bind to the CD3 protein complex and a disease associated antigen. Furthermore, these hetero-dimeric immunoglobulins have reduced or eliminated binding to protein A and therefore can be purified to a very high degree of purity using affinity chromatography.

[0123] For the purposes of interpreting this specification, the following definitions will apply and whenever appropriate, terms used in the singular will also include the plural and vice versa. It is to be understood that the terminology used herein is for the purpose of describing particular embodiments only and is not intended to be limiting.

[0124] The terms “polypeptide” and “protein” refer to a polymer of amino acid residues wherein amino acids are combined via peptide bonds to form a chain of amino acids that have been linked together via dehydration synthesis. Polypeptides and proteins can be synthesized through chemical synthesis or recombinant expression and are not limited to a minimum amino acid length.

[0125] In accordance with the invention, the group of polypeptides comprises “proteins” as long as the proteins consist of a single polypeptide chain. Polypeptides may further form multimers such as dimers, trimers and higher oligomers, i.e. consisting of more than one polypeptide molecule. Polypeptide molecules forming such dimers, trimers etc. may be identical or non-identical. The corresponding higher order structures of such multimers are, consequently, termed homo- or hetero-dimers, homo- or hetero-trimers etc. An example for a hetero-multimer is an antibody molecule, which, in its naturally occurring form, consists of two identical light polypeptide chains and two identical heavy polypeptide chains. The terms “polypeptide” and “protein” also refer to naturally modified polypeptides/proteins wherein the modification is effected e.g. by post-translational modifications like glycosylation, acetylation, phosphorylation and the like. Such modifications are well known in the art. Furthermore, for purposes of the present invention, a “polypeptide” refers to a protein which includes modifications, such as deletions, additions and substitutions (which can be conservative in nature) to the native sequence. These modifications may be deliberate, as through site-directed mutagenesis, or may be accidental, such as through mutations of hosts which produce the proteins or errors due to PCR amplification.

[0126] The term “CD3 complex” as used herein refers to the protein complex known as the CD3 (cluster of differentiation 3) T-cell co-receptor (Wucherpfennig K W et al., (2010) Cold Spring Harb Perspect Biol, 2(4): a005140). The CD3 protein complex is composed of four distinct chains. In mammals, the complex contains a CD3γ chain, a CD3δ chain, and two CD3ε chains. These chains associate with a molecule known as the T-cell receptor (TCR) and the ζ-chain to generate an activation signal in T lymphocytes (van der Merwe P A & Dushek O (2011) Nat Rev Immunol, 11(1): 47-55). The TCR, ζ-chain, and CD3 molecules together comprise the TCR complex. The CD3γ, CD3δ, and CD3ε chains are highly related cell-surface proteins of the immunoglobulin superfamily containing a single extracellular immunoglobulin domain. The intracellular tails of the CD3 molecules contain a single conserved motif known as an immunoreceptor tyrosine-based activation motif or ITAM for short, which is essential for the signalling capacity of the TCR. Since CD3 is required for T-cell activation, drugs (often monoclonal antibodies) that target CD3 have and are being investigated as immunosuppressant therapies.

[0127] The term “disease associated antigen” as used herein refers to molecules that are involved in a disease process. Examples of disease associated antigens are found in a broad range of therapeutic areas such as inflammation, cancer and autoimmune diseases. In oncology, disease associated antigens are molecules that can broadly be used for the screening and/or monitoring and/or therapeutic targeting of cancers within a patient population, for example EpCAM antigen in prostate cancer. Tumour antigens can be produced directly by the tumour or by non-tumour cells as a response to the presence of a tumour and preferred tumour antigens are cell-surface molecules. Inflammatory disease associated antigens are known, which include but are not limited to, pro-inflammatory cytokines such as TNF-α and IL-1. Autoimmune disease associated antigens are also known; examples of these include but are not limited to antibodies against double-stranded DNA in systemic lupus erythematosus and amyloid beta peptide in Alzheimers disease.

[0128] The term “immunoglobulin” as referred to herein can be used interchangeably with the term “antibody”. Immunoglobulin includes full-length antibodies and any antigen binding fragment or single chains thereof. Immunoglobulins can be homo-dimeric or hetero-dimeric. Immunoglobulins and specifically naturally occurring antibodies are glycoproteins which exist as one or more copies of a Y-shaped unit, composed of four polypeptide chains. Each “Y” shape contains two identical copies of a heavy (H) chain and two identical copies of a light (L) chain, named as such by their relative molecular weights. Each light chain pairs with a heavy chain and each heavy chain pairs with another heavy chain. Covalent interchain disulfide bonds and non-covalent interactions link the chains together. Immunoglobulins and specifically naturally occurring antibodies contain variable regions, which are the two copies of the antigen binding site. Papain, a proteolytic enzyme splits the “Y” shape into three separate molecules, two so called “Fab” or “FAB” fragments (Fab=fragment antigen binding) and one so called “Fe” fragment or “Fc region” (Fc=fragment crystallizable). A Fab fragment consists of the entire light chain and part of the heavy chain. The heavy chain contains one variable region (VH) and either three or four constant regions (CH1, CH2, CH3 and CH4, depending on the antibody class or isotype). The region between the CH1 and CH2 regions is called the hinge region and permits flexibility between the two Fab arms of the Y-shaped antibody molecule, allowing them to open and close to accommodate binding to two antigenic determinants separated by a fixed distance. The “hinge region” as referred to herein is a sequence region of 6-62 amino acids in length, only present in IgA, IgD and IgG, which encompasses the cysteine residues that bridge the two heavy chains. The heavy chains of IgA, IgD and IgG each have four regions, i.e. one variable region (VH) and three constant regions (CH1-3). IgE and IgM have one variable and four constant regions (CH1-4) on the heavy chain. The constant regions of the immunoglobulins may mediate the binding to host tissues or factors, including various cells of the immune system (e.g., effector cells) and the first component (C1q) of the complement system classical pathway. Each light chain is usually linked to a heavy chain by one covalent disulfide bond. Each light chain contains one variable region (VL) and one light chain constant region. The light chain constant region is a kappa light chain constant region designated herein as IGKC or is a lambda light chain constant region designated herein as IGLC. IGKC is used herein equivalently to CK or CK and has the same meaning. IGLC is used herein equivalently to CA or CL and has the same meaning. The term “an IGLC region” as used herein refer to all lambda light chain constant regions e.g. to all lambda light chain constant regions selected from the group consisting of IGLC1, IGLC2, IGLC3, IGLC6 and IGLC7. The VH and VL regions can be further subdivided into regions of hypervariability, termed complementarity determining regions (CDR), interspersed with regions that are more conserved, termed framework regions (FR or FW). Each VH and VL is composed of three CDRs and four FRs, arranged from amino-terminus to carboxy-terminus in the following order: FR1, CDR1, FR2, CDR2, FR3, CDR3, FR4. The variable regions of the heavy and light chains contain an epitope-binding region that interacts with an antigen. Engineered immunoglobulins can encompass different epitope binding region formats such as scFv, FAB or dAb fragments. These fragments are usually assembled in an antibody-like structure by genetic fusion to a IgG Fc region. Engineered immunoglobulins can be constructed as homo or hetero-dimers with or without the use of hetero-dimerization enhancing techniques, and can have mono- or bispecific binding properties.

[0129] The term “full length antibody” as used herein includes the structure that constitutes the natural biological form of an antibody, including variable and constant regions. For example, in most mammals, including humans and mice, the full length antibody of the IgG class is a tetramer and consists of two identical pairs of two immunoglobulin chains, each pair having one light and one heavy chain, each light chain comprising immunoglobulin regions VL and a light chain constant region, and each heavy chain comprising immunoglobulin regions VH, CH1 (Cγ1), CH2 (Cγ2), CH3 (Cγ3) and CH4 (Cγ4), depending on the antibody class or isotype). In some mammals, for example in camels and llamas, IgG antibodies may consist of only two heavy chains, each heavy chain comprising a variable region attached to the Fc region.

[0130] Antibodies are grouped into classes, also referred to as isotypes, as determined genetically by the constant region. Human constant light chains are classified as kappa (CK) and lambda (Cλ) light chains. Heavy chains are classified as mu (μ), delta (δ), gamma (γ), alpha (α), or epsilon (ε) and define the antibody's isotype as IgM, IgD, IgG, IgA and IgE, respectively. Thus, “isotype” as used herein is meant any of the classes and/or subclasses of immunoglobulins defined by the chemical and antigenic characteristics of their constant regions. The known human immunoglobulin isotypes are IGHG1 (IgG1), IGHG2 (IgG2), IGHG3 (IgG3), IGHG4 (IgG4), IGHA1 (IgA1), IGHA2 (IgA2), IGHM (IgM), IGHD (IgD) and IGHE (IgE). The so-called human immunoglobulin pseudo-gamma IGHGP gene represents an additional human immunoglobulin heavy constant region gene which has been sequenced but does not encode a protein due to an altered switch region (Bensmana M et al., (1988) Nucleic Acids Res, 16(7): 3108). In spite of having an altered switch region, the human immunoglobulin pseudo-gamma IGHGP gene has open reading frames for all heavy constant regions (CH1-CH3) and hinge. All open reading frames for its heavy constant regions encode protein regions which align well with all human immunoglobulin constant regions with the predicted structural features. This additional pseudo-gamma isotype is referred herein as IgGP or IGHGP. Other pseudo immunoglobulin genes have been reported such as the human immunoglobulin heavy constant region epsilon P1 and P2 pseudo-genes (IGHEP1 and IGHEP2). The IgG class is the most commonly used for therapeutic purposes. In humans this class comprises subclasses IgG1, IgG2, IgG3 and IgG4. In mice this class comprises subclasses IgG1, IgG2a, IgG2b. IgG2c and IgG3.

[0131] The term “Immunoglobulin fragments” as used herein include, but is not limited to, (i) a region including for example a CH1, a CH2 or a CH3 region, (ii) the Fab fragment consisting of VL, VH, CL or CK and CH1 regions, including Fab′ and Fab′-SH, (ii) the Fd fragment consisting of the VH and CH1 regions, (iii) the dAb fragment (Ward E S et al., (1989) Nature, 341(6242): 544-6) which consists of a single variable region (iv) F(ab′)₂ fragments, a bivalent fragment comprising two linked Fab fragments (v) single chain Fv fragments (scFv), wherein a VH region and a VL region are linked by a peptide linker which allows the two regions to associate to form an antigen binding site (Bird R E et al., (1988) Science, 242(4877): 423-6; Huston J S et al., (1988) Proc Natl Acad Sci USA, 85(16): 5879-83), (vi) “diabodies” or “triabodies”, multivalent or multispecific fragments constructed by gene fusion (Holliger P et al., (1993) Proc Natl Acad Sci USA, 90(14): 6444-8; Tomlinson I & Holliger P, (2000) Methods Enzymol, 326:461-79), (vii) scFv, diabody or region antibody fused to an Fc region and (viii) scFv fused to the same or a different antibody.

[0132] The term “variable region” refers to the regions or domains that mediates antigen-binding and defines specificity of a particular antibody for a particular antigen. In naturally occurring antibodies, the antigen-binding site consists of two variable regions that define specificity: one located in the heavy chain, referred herein as heavy chain variable region (VH) and the other located in the light chain, referred herein as light chain variable region (VL). In humans, the heavy chain variable region (VH) can be divided into seven subgroups or subclasses: VH1, VH2, VH3, VH4, VH5, VH6 and VH7. In some cases, specificity may exclusively reside in only one of the two regions as in single-domain antibodies from heavy-chain antibodies found in camelids. The V regions are usually about 110 amino acids long and consist of relatively invariant stretches of amino acid sequence called framework regions (FRs or “non-CDR regions”) of 15-30 amino acids separated by shorter regions of extreme variability called “hypervariable regions” that are 7-17 amino acids long. The variable domains of native heavy and light chains comprise four FRs, largely adopting a beta-sheet configuration, connected by three hypervariable regions, which form loops. The hypervariable regions in each chain are held together in close proximity by FRs and, with the hypervariable regions from the other chain, contribute to the formation of the antigen binding site of antibodies (see Kabat E A et al., supra.). The term “hypervariable region” as used herein refers to the amino acid residues of an antibody which are responsible for antigen binding. The hypervariable region generally comprises amino acid residues from a “complementary determining region” or “CDR”, the latter being of highest sequence variability and/or involved in antigen recognition. For all variable regions numbering is according to Kabat (Kabat E A et al., supra.).

[0133] A number of CDR definitions are in use and are encompassed herein. The Kabat definition is based on sequence variability and is the most commonly used (Kabat E A et al., supra.). Chothia refers instead to the location of the structural loops (Chothia & Lesk J. (1987) Mol Biol, 196: 901-917). The AbM definition is a compromise between the Kabat and the Chothia definitions and is used by Oxford Molecular's AbM antibody modelling software (Martin A C R et al., (1989) Proc Natl Acad Sci USA 86:9268-9272; Martin A C R et al., (1991) Methods Enzymol, 203: 121-153; Pedersen J T et al., (1992) Immunomethods, 1: 126-136; Rees A R et al., (1996) In Sternberg M. J. E. (ed.), Protein Structure Prediction. Oxford University Press, Oxford, 141-172). The contact definition has been recently introduced (MacCallum R M et al., (1996) J Mol Biol, 262: 732-745) and is based on an analysis of the available complex structures available in the Protein Databank. The definition of the CDR by IMGT®, the international ImMunoGeneTics information System® (http://www.imgt.org) is based on the IMGT numbering for all immunoglobulin and T cell receptor V-REGIONs of all species (IMGT®, the international ImMunoGeneTics information system %; Lefranc M P et al., (1999) Nucleic Acids Res, 27(1): 209-12; Ruiz M et al., (2000) Nucleic Acids Res, 28(1): 219-21; Lefranc M P (2001) Nucleic Acids Res, 29(1): 207-9; Lefranc M P (2003) Nucleic Acids Res, 31(1): 307-10; Lefranc M P et al., (2005) Dev Comp Immunol, 29(3): 185-203; Kaas Q et al., (2007) Briefings in Functional Genomics & Proteomics, 6(4): 253-64). All Complementarity Determining Regions (CDRs) as referred to in the present invention, are defined preferably as follows (numbering according to Kabat E A et al., supra): LCDR1: 24-34, LCDR2: 50-56, LCDR3: 89-98, HCDR1: 26-35, HCDR2: 50-65, HCDR3: 95-102.

[0134] The “non-CDR regions” of the variable domain are known as framework regions (FR). The “non-CDR regions” of the VL region as used herein comprise the amino acid sequences: 1-23 (FR1), 35-49 (FR2), 57-88 (FR3) and 99-107 (FR4). The “non-CDR regions” of the VH region as used herein comprise the amino acid sequences: 1-25 (FR1), 36-49 (FR2), 66-94 (FR3) and 103-113 (FR4).

[0135] The CDRs of the present invention may comprise “extended CDRs” which are based on the aforementioned definitions and have variable domain residues as follows: LCDR1: 24-36, LCDR2: 46-56, LCDR3:89-97, HCDR1: 26-35, HCDR2:47-65, HCDR3: 93-102. These extended CDRs are numbered as well according to Kabat et al., supra. The “non-extended CDR region” of the VL region as used herein comprise the amino acid sequences: 1-23 (FR1), 37-45 (FR2), 57-88 (FR3) and 98—approximately 107 (FR4). The “non-extended CDR region” of the V H region as used herein comprise the amino acid sequences: 1-25 (FR1), 37-46 (FR2), 66-92 (FR3) and 103—approximately 113 (FR4).

[0136] The term “Fab” or “FAB” or “Fab region” or “FAB region” as used herein includes the polypeptides that comprise the VH, CH1, VL and light chain constant immunoglobulin regions. Fab may refer to this region in isolation, or this region in the context of a full length antibody or antibody fragment.

[0137] The term “Fc” or “Fc region”, as used herein includes the polypeptide comprising the constant region of an antibody heavy chain excluding the first constant region immunoglobulin region. Thus Fc refers to the last two constant region immunoglobulin regions of IgA, IgD and IgG or the last three constant region immunoglobulin regions of IgE and IgM, and the flexible hinge N-terminal to these regions. For IgA and IgM, Fc may include the J chain. For IgG, Fc comprises immunoglobulin regions Cgamma2 and Cgamma3 (Cγ2 and Cγ3) and the hinge between Cgamma1 (Cγ1) and Cgamma2 (Cγ2). Although the boundaries of the Fc region may vary, the human IgG heavy chain Fc region is usually defined to comprise residues C226 or P230 to its carboxyl-terminus, wherein the numbering is according to the EU index. Fc may refer to this region in isolation or this region in the context of an Fc polypeptide, for example an antibody.

[0138] The term “immunoglobulin constant region” as used herein refers to immunoglobulin or antibody heavy chain constant regions from human or animal species and encompasses all isotypes. Preferably, immunoglobulin constant regions are of human origin and are selected from the group consisting of, but not limited to: IGHG1 CH1, IGHG2 CH1, IGHG3 CH1, IGHG4 CH1, IGHA1 CH1, IGHA2 CH1, IGHE CH1, IGHEP1 CH1, IGHM CH1, IGHD CH1, IGHGP CH1, IGHG1 CH2, IGHG2 CH2, IGHG3 CH2, IGHG4 CH2, IGHA1 CH2, IGHA2 CH2, IGHE CH2, IGHEP1 CH2, IGHM CH2, IGHD CH2, IGHGP CH2, IGHG1 CH3, IGHG2 CH3, IGHG3 CH3, IGHG4 CH3, IGHA1 CH3, IGHA2 CH3, IGHE CH3, IGHEP1 CH3, IGHM CH3, IGHD CH3, IGHGP CH3, IGHE CH4 and IGHM CH4. Preferred “immunoglobulin constant regions” are selected from the group consisting of human IGHE CH2, IGHM CH2, IGHG1 CH3, IGHG2 CH3, IGHG3 CH3, IGHG4 CH3, IGHA1 CH3, IGHA2 CH3, IGHE CH3, IGHM CH3, IGHD CH3 and IGHGP CH3. More preferred “immunoglobulin constant regions” are selected from the group consisting of human IGHG1 CH3, IGHG2 CH3, IGHG3 CH3. IGHG4 CH3, IGHA1 CH3, IGHA2 CH3, IGHE CH3. IGHM CH3, IGHD CH3 and IGHGP CH3.

[0139] The term “epitope binding region” includes a polypeptide or a fragment thereof having minimal amino acid sequence to permit the specific binding of the immunoglobulin molecule to one or more epitopes. Naturally occurring antibodies have two epitope binding regions which are also known as antigen binding or combining sites or paratopes. Epitope binding regions in naturally occurring antibodies are confined within the CDR regions of the VH and/or VL domains wherein the amino acid mediating epitope binding are found. In addition to naturally occurring antibodies, artificial VH domains or VL domains or fragments thereof and combinations thereof can be engineered to provide epitope binding regions (Holt L J et al., (2003) Trends Biotechnol, 21(11): 484-490; Polonelli L et al., (2008) PLoS ONE, 3(6): e2371). Examples of non-immunoglobulin based epitope binding regions can be found in artificial protein domains used as “scaffold” for engineering epitope binding regions (Binz H K et al., (2005) Nat Biotechnol, 23(10): 1257-1268) or peptide mimetics (Murali R & Greene M I (2012) Pharmaceuticals, 5(2): 209-235). Preferably the term ‘epitope binding region’ includes the combination of one or more heavy chain variable domains and one or more complementary light chain variable domains which together forms a binding site which permits the specific binding of the immunoglobulin molecule to one or more epitopes. Examples of an epitope binding region as exemplified in the present invention include scFv and FAB.

[0140] As used herein, the term “epitope” includes a fragment of a polypeptide or protein or a non-protein molecule having antigenic or immunogenic activity in an animal, preferably in a mammal and most preferably in a human. An epitope having immunogenic activity is a fragment of a polypeptide or protein that elicits an antibody response in an animal. An epitope having antigenic activity is a fragment of a polypeptide or protein to which an antibody or polypeptide specifically binds as determined by any method well-known to one of skill in the art, for example by immunoassays. Antigenic epitopes need not necessarily be immunogenic. Preferably, the term “epitope” as used herein refers to a polypeptide sequence of at least about 3 to 5, preferably about 5 to 10 or 15 and not more than about 1,000 amino acids (or any integer there between), which define a sequence that by itself or as part of a larger sequence, binds to an antibody generated in response to such sequence. There is no critical upper limit to the length of the fragment, which may comprise nearly the full-length of the protein sequence, or even a fusion protein comprising one or more epitopes. An epitope for use in the subject invention is not limited to a polypeptide having the exact sequence of the portion of the parent protein from which it is derived. Thus the term “epitope” encompasses sequences identical to the native sequence, as well as modifications to the native sequence, such as deletions, additions and substitutions (generally conservative in nature). The epitopes of protein antigens are divided into two categories, conformational epitopes and linear epitopes, based on their structure and interaction with the epitope binding site (Goldsby R et al., (2003) “Antigens (Chapter 3)” Immunology (Fifth edition ed.), New York: W. H. Freeman and Company. pp. 57-75, ISBN 0-7167-4947-5). A conformational epitope is composed of discontinuous sections of the antigen's amino acid sequence. These epitopes interact with the paratope based on the 3-D surface features and shape or tertiary structure of the antigen. Most epitopes are conformational. By contrast, linear epitopes interact with the paratope based on their primary structure. A linear epitope is formed by a continuous sequence of amino acids from the antigen.

[0141] The term “hetero-dimeric immunoglobulin” or “hetero-dimeric fragment” or “hetero-dimer” or “hetero-dimer of heavy chains” as used herein includes an immunoglobulin molecule or part of comprising at least a first and a second polypeptide, like a first and a second region, wherein the second polypeptide differs in amino acid sequence from the first polypeptide. Preferably, a hetero-dimeric immunoglobulin comprises two polypeptide chains, wherein the first chain has at least one non-identical region to the second chain, and wherein both chains assemble, i.e. interact through their non-identical regions. More preferably the hetero-dimeric immunoglobulin, has binding specificity for at least two different ligands, antigens or binding sites, i.e. is bispecific. Hetero-dimeric immunoglobulin as used herein includes but is not limited to full length bispecific antibodies, bispecifc Fab, bispecifc F(ab′)₂, bispecific scFv fused to an Fc region, diabody fused to an Fc region and domain antibody fused to an Fc region.

[0142] The term “homo-dimeric immunoglobulin” or “homo-dimeric fragment” or “homo-dimer” or “homo-dimer of heavy chains” as used herein includes an immunoglobulin molecule or part of comprising at least a first and a second polypeptide, like a first and a second region, wherein the second polypeptide is identical in amino acid sequence to the first polypeptide. Preferably, a homo-dimeric immunoglobulin comprises two polypeptide chains, wherein the first chain has at least one identical region to the second chain, and wherein both chains assemble, i.e. interact through their identical regions. Preferably, a homo-dimeric immunoglobulin fragment comprises at least two regions, wherein the first region is identical to the second region, and wherein both regions assemble, i.e. interact through their protein-protein interfaces.

[0143] For all immunoglobulin constant regions included in the present invention, numbering can be according to the IMGT® (IMGT®; supra).

[0144] For all human CH1, CH2, CH3 immunoglobulin heavy chain constant regions selected from the group consisting of IGHG1, IGHG2, IGHG3 and IGHG4, numbering can be according to the “EU numbering system” (Edelman G M et al., (1969) Proc Natl Acad Sci USA, 63(1): 78-85). A complete correspondence for the human CH1, hinge, CH2 and CH3 constant regions of IGHG1 can be found at the IMGT database (IMGT®; supra).

[0145] For the human kappa immunoglobulin light chain constant region (IGKC), numbering can be according to the “EU numbering system” (Edelman G M et al., supra). A complete correspondence for the human CK region can be found at IMGT database (IMGT®; supra).

[0146] For the human lambda immunoglobulin light chain constant regions (IGLC1, IGLC2, IGLC3, IGLC6 and IGLC7), numbering can be according to the “Kabat numbering system” (Kabat E A et al., supra). A complete correspondence for human IGLC regions can be found at the IMGT database (IMGT®; supra).

[0147] The human IGHG1 immunoglobulin heavy chain constant regions as referred to herein have the following region boundaries: CH1 region (EU numbering: 118-215), Hinge γ1 region (EU numbering: 216-230), CH2 region (EU numbering: 231-340) and CH3 region (EU numbering: 341-447). The human CK region referred herein spans residues 108 to 214 (EU numbering). The human IGLC1, IGLC2, IGLC3, IGLC6 and IGLC7 regions referred herein span residues 108-215 (Kabat numbering).

[0148] The terms “amino acid” or “amino acid residue” as used herein includes natural amino acids as well as non-natural amino acids. Preferably natural amino acids are included.

[0149] The term “modification” or “amino acid modification” herein includes an amino acid substitution, insertion and/or deletion in a polypeptide sequence. The terms “substitution” or “amino acid substitution” or “amino acid residue substitution” as used herein refers to a substitution of a first amino acid residue in an amino acid sequence with a second amino acid residue, whereas the first amino acid residue is different from the second amino acid residue i.e. the substituted amino acid residue is different from the amino acid which has been substituted. For example, the substitution R94K refers to a variant polypeptide, in which the arginine at position 94 is replaced with a lysine. For example 94K indicates the substitution of position 94 with a lysine. For the purposes herein, multiple substitutions are typically separated by a slash or a comma. For example, “R94K/L78V” or “R94K, L78V” refers to a double variant comprising the substitutions R94K and L78V. By “amino acid insertion” or “insertion” as used herein is meant the addition of an amino acid at a particular position in a parent polypeptide sequence. For example, insert −94 designates an insertion at position 94. By “amino acid deletion” or “deletion” as used herein is meant the removal of an amino acid at a particular position in a parent polypeptide sequence. For example, R94—designates the deletion of arginine at position 94.

[0150] In certain embodiments, the terms “decrease”, “reduce”, or “reduction” in binding to Protein A refers to an overall decrease of at least 25%, 30%, 40%, 50%, 60%, 70%, 80%, 85%, 90%, 95%, 97%, or 99% up to 100% (elimination) in the binding of a modified immunoglobulin or fragment thereof to Protein A detected by standard art known methods such as those described herein, as compared to a parental i.e. unmodified immunoglobulin or wild-type IgG or an IgG having the wild-type human IgG Fc region. In certain embodiments these terms alternatively may refer to an overall decrease of 10-fold (i.e. 1 log), 100-fold (2 logs), 1,000-fold (or 3 logs), 10,000-fold (or 4 logs), or 100,000-fold (or 5 logs).

[0151] The terms “eliminate”, “abrogate”, “elimination” or “abrogation” of binding to Protein A refers to an overall decrease of 100% in the binding of a modified immunoglobulin or fragment thereof to Protein A i.e. a complete loss of the binding of a modified immunoglobulin or fragment thereof to Protein A, detected by standard art known methods such as those described herein, as compared to a parental i.e. unmodified immunoglobulin or wild-type IgG or an IgG having the wild-type human IgG Fc region.

[0152] Similarly, the terms “decrease”. “reduce”, or “reduction” in binding to an affinity reagent refers to an overall decrease of at least 25%, 30%, 40%, 50%, 60%, 70%, 80%, 85%, 90%, 95%, 97%, or 99% up to 100% (elimination) in the binding of a modified immunoglobulin or fragment thereof to the affinity reagent detected by standard art known methods such as those described herein, as compared to a parental, i.e. unmodified immunoglobulin or wild-type IgG or an IgG having the wild-type human IgG Fc region. In certain embodiments these terms alternatively may refer to an overall decrease of 10-fold (i.e. 1 log), 100-fold (2 logs), 1,000-fold (or 3 logs), 10,000-fold (or 4 logs), or 100,000-fold (or 5 logs).

[0153] The terms “eliminate”, “abrogate”, “elimination” or “abrogation” of binding to an affinity reagent refers to an overall decrease of 100% in the binding of a modified immunoglobulin or fragment thereof to the affinity reagent i.e. a complete loss of the binding of a modified immunoglobulin or fragment thereof to the affinity reagent detected by standard art known methods such as those described herein, as compared to a parental, i.e. unmodified immunoglobulin or wild-type IgG or an IgG having the wild-type human IgG Fc region.

[0154] “Bispecific antibodies” are monoclonal antibodies that have binding specificities for at least two different antigens. In certain embodiments, the bispecific antibodies are bispecific antibodies with one or more amino acid modifications in the VH region relative to the parental antibody. In certain embodiments, bispecific antibodies may be human or humanized antibodies. Bispecific antibodies may also be used to localize cytotoxic agents to cells which express a target antigen. These antibodies possess a target-antigen-binding arm and an arm which binds a cytotoxic agent, such as, e.g., saporin, anti-interferon-α, vinca alkaloid, ricin A chain, methotrexate or radioactive isotope hapten. Bispecific antibodies can be prepared as full length antibodies or antibody fragments. Methods for making bispecific antibodies are known in the art. Traditionally, the recombinant production of bispecific antibodies is based on the co-expression of two immunoglobulin heavy chain-light chain pairs, where the two heavy chains have different specificities (Milstein and Cuello, (1983) Nature, 305: 537-40). Because of the random assortment of immunoglobulin heavy and light chains, these hybridomas (quadromas) produce a potential mixture of different antibody molecules, of which only one has the correct bispecific structure. The purification of the correct molecule, which is usually done by affinity chromatography steps, is rather cumbersome and the product yields are low. Similar procedures are disclosed in WO1993/08829 and in Traunecker et al., (1991) EMBO J, 10: 3655-9. According to a different approach, antibody variable regions with the desired binding specificities (antibody-antigen combining sites) are fused to immunoglobulin constant region sequences. The fusion, for example, is with an immunoglobulin heavy chain constant region, comprising at least part of the hinge, CH2 and CH3 regions. In certain embodiments, the first heavy-chain constant region (CH1), containing the site necessary for light chain binding, is present in at least one of the fusions. DNAs encoding the immunoglobulin heavy chain fusions and, if desired, the immunoglobulin light chain, are inserted into separate expression vectors and are co-transfected into a suitable host organism. This provides for flexibility in adjusting the mutual proportions of the three polypeptide fragments in embodiments when unequal ratios of the three polypeptide chains used in the construction provide the optimum yields. It is, however, possible to insert the coding sequences for two or all three polypeptide chains in one expression vector when the expression of at least two polypeptide chains in equal ratios results in high yields or when the ratios are of no particular significance.

[0155] Bispecific antibodies include cross-linked or “heteroconjugate” antibodies. For example, one of the antibodies in the heteroconjugate can be coupled to avidin, the other to biotin. Such antibodies have, for example, been proposed to target immune system cells to unwanted cells (U.S. Pat. No. 4,676,980) and for treatment of HIV infection (WO1991/00360, WO1992/00373 and EP03089). Heteroconjugate antibodies may be made using any convenient cross-linking method. Suitable cross-linking agents are well known in the art (see U.S. Pat. No. 4,676,980), along with a number of cross-linking techniques. Antibodies with more than two valencies are also contemplated. For example, trispecific antibodies can be prepared (see Tutt A et al. (1991) J. Immunol. 147: 60-9).

[0156] In some embodiments the present disclosure provides a bispecific hetero-dimeric immunoglobulin or fragment thereof or a bispecific full-length antibody which binds to CD3 and a disease associated antigens selected from within the groups of: tumor antigens, cytokines, vascular growth factors and lympho-angiogenic growth factors. Preferably the bispecific hetero-dimeric immunoglobulin or fragment thereof or the bispecific antibody binds to CD3 and a disease associated antigen selected from the group consisting of: CD33, TROP2, CD105, GD2, GD3, CEA, VEGFR1, VEGFR2, NCAM, CD133, CD123, ADAM17, MCSP, PSCA, FOLR1, CD19, CD20, CD38, EpCAM, HER2, HER3, EGFR, PSMA, IgE, Integrin a4b1, CCR5, LewisY, FAP, MUC-1, Wue-1, MSP, EGFRvIII, P glycoprotein, AFP, ALK, BAGE proteins, CD30. CD40, CTLA4, ErbB3, ErbB4, Mesothelin, OX40, CA125, CAIX, CD66e, cMet, EphA2, HGF/SF, MUC1, Phosphatidylserine, TAG-72, TPBG, β-catenin, brc-abl, BRCA1, BORIS, CA9, caspase-8, CDK4, Cyclin-B1, CYP1B1, ETV6-AML, Fra-1, FOLR1, GAGE-1, GAGE-2, GloboH, glypican-3, GM3, gp100, HLA/B-raf, HLA/k-ras, HLA/MAGE-A3, hTERT, LMP2, MAGE1, MAGE2, MAGE3, MAGE4, MAGE6, MAGE12, MART-1, ML-IAP, Muc2, Muc3, Muc4, Muc5, Muc16, MUM1, NA17, NY-BR1, NY-BR62, NY-BR-85, NY-ESO1, p15, p53, PAP, PAX3 PAX5, PCTA-1, PLAC1, PRLR, PRAME, RAGE proteins, Ras, RGS5. Rho, SART-1, SART-3, Steap-1, Steap-2, survivin, TAG-72, TGF-3, TMPRSS2, Tn, TRP-1, TRP-2, tyrosinase, uroplakin-3, PSMA. Preferably the bispecific hetero-dimeric immunoglobulin or fragment thereof or the bispecific antibody binds to CD3 and HER2 or CD3 and CD38 or CD3 and OX40.

[0157] Protein A:

[0158] Protein A is a cell wall component produced by several strains of Staphylococcus aureus which consists of a single polypeptide chain. The Protein A gene product consists of five homologous repeats attached in a tandem fashion to the pathogen's cell wall. The five domains are approximately 58 amino acids in length and denoted EDABC, each exhibiting immunoglobulin binding activity (Tashiro M & Montelione G T (1995) Curr. Opin. Struct. Biol., 5(4): 471-481). The five homologous immunoglobulin binding domains fold into a three-helix bundle. Each domain is able to bind proteins from many mammalian species, most notably IgGs (Hober S et al., (2007) J. Chromatogr. B Analyt. Technol. Biomed. Life Sci., 848(1): 40-47). Protein A binds the heavy chain of most immunoglobulins within the Fc region but also within the Fab region in the case of the human VH3 family (Jansson B et al, (1998) FEMS Immunol. Med. Microbiol., 20(1): 69-78). Protein A binds IgG from various species including human, mouse, rabbit and guinea pig but does not bind human IgG3 (Hober S et al., (2007) supra). The inability of human IgG3 to bind Protein A can be explained by the H435R and Y436F substitutions in the human IgG3 Fc region (EU numbering, Jendeberg et al., (1997) J. Immunol. Methods, 201(1): 25-34). Besides IgG, Protein A also interacts with IgM and IgA.

[0159] Amongst human VH subclasses, VH3 is the only subclass to bind Protein A (Graille M et al., (2000) Proc. Natl. Acad. Sci. USA 97(10): 5399-5404), and all five domains of Protein A are known to bind this variable domain subclass (Jansson B et al, (1998) FEMS Immunol. Med. Microbiol., 20(1): 69-78. VH3 based immunoglobulins or fragments thereof are of major importance to the biotechnology industry. VH3 based molecules have been extensively developed since their ability to bind Protein A facilitates their functional pre-screening, and as such many synthetic or donor based phage display libraries or transgenic animal technologies used for antibody discovery are based on the VH3 subclass. In addition VH3 based molecules are often selected for their good expression and stability over other known heavy chain variable domain subclasses.

[0160] The capacity of Protein A to bind antibodies with such high affinity is the driving motivation for its industrial scale use in biologic pharmaceuticals. Protein A used for production of antibodies in bio-pharmaceuticals is usually produced recombinantly in E. coli and functions essentially the same as native Protein A (Liu H F et al., (2010) MAbs, 2(5): 480-499). Most commonly, recombinant Protein A is bound to a stationary phase chromatography resin for purification of antibodies. Optimal binding occurs at pH8.2, although binding is also good at neutral or physiological conditions (pH 7.0-7.6). Elution is usually achieved through pH shift towards acidic pH (glycine-HCl, pH2.5-3.0). This effectively dissociates most protein-protein and antibody-antigen binding interactions without permanently affecting protein structure. Nevertheless, some antibodies and proteins are damaged by low pH and it is best to neutralize immediately after recovery by addition of 1/10th volume of alkaline buffer such as 1 M Tris-HCl, pH 8.0 to minimize the duration of time in the low-pH condition.

[0161] There are various commercially available Protein A chromatography resins. The main differences between these media are the support matrix type, Protein A ligand modification, pore size and particle size. The differences in these factors give rise to differences in compressibility, chemical and physical robustness, diffusion resistance and binding capacity of the adsorbents (Hober S et al., (2007), supra). Examples of Protein A chromatography resins include but are not limited to the MabSelect SuRe™ Protein A resin and MabSelect™ Protein A resin from GE Healthcare as used in examples.

[0162] The term “chromatography” refers to protein liquid chromatography and includes fast protein liquid chromatography (FPLC) which is a form of liquid chromatography that is often used to analyze or purify mixtures of proteins. As in other forms of chromatography, separation is possible because the different components of a mixture have different affinities for two materials, a moving fluid (the mobile phase) which passes through a porous solid (the stationary phase). In FPLC, the mobile phase is an aqueous solution, or “buffer”. The buffer flow rate can be operated under gravity flow or controlled by a positive-displacement pump which is normally kept at a constant rate, while the composition of the buffer can be varied by drawing fluids in different proportions from two or more external reservoirs. The stationary phase is a resin composed of beads, usually of cross-linked agarose, packed into a cylindrical glass or plastic column. FPLC resins are available in a wide range of bead sizes and surface ligands depending on the application.

[0163] The process of “affinity chromatography” involves the use of an affinity reagent as ligands which are cross-linked to the stationary phase and that have binding affinity to specific molecules or a class of molecules. Ligands can be bio-molecules, like protein ligands or can be synthetic molecules. Both types of ligand tend to have good specificity. The most commonly used protein ligand in production is the affinity reagent Protein A. In affinity chromatography when the solution (for example a crude cell supernatant containing a protein of interest) is loaded onto to the column the target protein is usually adsorbed while allowing contaminants (other proteins, lipids, carbohydrates, DNA, pigments, etc.) to pass through the column. The adsorbent itself is normally packed in a chromatography column; though the adsorption stage can be performed by using the adsorbent as a stirred slurry in batch binding mode. The next stage after adsorption is the wash stage, in which the adsorbent is washed to remove residual contaminants. The bound protein is then eluted in a semi-pure or pure form. Elution is normally achieved by changing the buffer or salt composition so that the protein can no longer interact with the immobilized ligand and is released. In some instances the protein of interest may not bind the affinity resin and affinity chromatography is directed at binding unwanted contaminants and the unbound fraction is therefore collected to isolate the protein of interest. Affinity chromatography can be performed in a fixed bed or a fluidised bed.

[0164] The term “gradient mode chromatography” refers to a chromatography method wherein the proportion of the “elution” buffer (buffer B) is increased from 0% to 100% in a gradual or stepwise manner.

[0165] The terms “capture-elution mode chromatography” or “capture-elution purification mode” or “capture-elution purification” refers to a chromatography method wherein the proportion of the “elution” buffer (buffer B) is not increased from 0% to 100% in a gradual or stepwise manner but rather directly applied at a 100% after capture and optionally a wash step with running buffer (buffer A).

### Development of Hetero-Dimeric Immunoglobulins Targeting CD3

[0166] The present invention provides an epitope binding region that binds the CD3 protein complex comprising the heavy and light chain CDRs as described supra and further comprising a heavy chain variable framework region that is the product of or derived from human gene IGHV3-23*04 (SEQ ID NO: 22). The heavy chain variable framework region comprises at least one amino acid modification from the corresponding framework region of the heavy chain variable region of the corresponding murine antibody OKT3 comprising the amino acid sequence of SEQ ID NO: 18. Preferably the amino acid modification is an amino acid substitution. Typically, no more than seven, preferably no more than six, preferably no more than five, preferably no more than four, more preferably no more than three, even more preferably no more than two, most preferably no more than one amino acid modifications are performed within a framework region. In some embodiments the present disclosure provides an epitope binding region that binds to the CD3 protein complex, wherein the amino acid modification of the framework regions of the heavy chain variable region comprise an amino acid substitution at amino acid position selected from the group consisting of: 34, 48, 49, 58, 69, 71 and 73 and wherein the amino acid position of each group member is indicated according to the Kabat numbering. Preferably, amino acid substitutions of the framework regions of the heavy chain variable region are selected from the group consisting of: I34M, V48I, A49G, R58N, R58Y, I69L, A71T and T73K. Preferred amino acid substitution of the framework regions of the heavy chain variable region are at amino acid positions selected from the group consisting of 34, 49 and 71. More preferred amino acid substitutions of the framework regions of the heavy chain variable region are selected from the group consisting of I34M, A49G and A71T.

[0167] In a further aspect, the epitope binding region of the first polypeptide that binds the CD3 protein complex comprises a light chain variable framework region that is the product of or derived from a human gene selected from the group consisting of: IGKV1-39*01 (SEQ ID NO: 23) and IGKV3-20*01 (SEQ ID NO: 24). The light chain variable framework region comprises at least one amino acid modification from the corresponding framework region of the light chain variable region of the corresponding murine antibody OKT3 comprising the amino acid sequence of SEQ ID NO: 19. Preferably the amino acid modification is an amino acid substitution. Typically, no more than eight, preferably no more than seven, preferably no more than six, preferably no more than five, preferably no more than four, more preferably no more than three, even more preferably no more than two, most preferably no more than one amino acid modifications are performed within a framework region. In some embodiments the present disclosure provides an epitope binding region that binds to the CD3 protein complex, wherein the amino acid modification of the framework regions of the light chain variable region sequence comprises an amino acid substitution at amino acid position selected from the group consisting of: 4, 33, 34, 46, 47, 66, 71 and 96. Preferably, amino acid substitutions of the framework regions of the light chain variable region are selected from the group consisting of: M4L, V33M, A34N, L46R, L47W, R66G, F71Y and P96F. Preferred amino acid substitution of the framework regions of the light chain variable region are at amino acid positions selected from the group consisting of 4, 46 and 47. More preferred amino acid substitutions of the framework regions of the light chain variable region are selected from the group consisting of M4L, L46R, L47W and F71Y. In some embodiments the epitope binding region of the first polypeptide that binds to the CD3 protein complex may comprise amino acid modifications of the framework regions of the heavy chain variable region sequence as set out above and amino acid modifications of the framework regions of the light chain variable region sequence as set out above.

[0168] The present disclosure also provides an antibody or fragment thereof that binds to the CD3 protein complex that comprises a heavy chain sequence selected from the group consisting of SEQ ID NOs: 27 to 38, 64-68 and 359, preferably selected consisting of SEQ ID NO: 359. The present disclosure also provides an antibody or fragment thereof that binds to the CD3 protein complex that comprises a light chain sequence selected from the group consisting of SEQ ID NOs: 39 to 47, 69 to 90 and 360 preferably consisting of SEQ ID NO: 360.

[0169] Given that each of these heavy and light chain variable region sequences can bind to the CD3 protein complex, the heavy and light chain variable region sequences can be “mixed and matched” to create anti-CD3 binding molecules of the invention. CD3 binding of such “mixed and matched” antibodies can be tested using the binding assays described e.g. in the Examples.

### Engineering of the Inmmunoglobulin Constant Region to Promote Hetero-Dimer Formation Over Homo-Dimer Formation

[0170] Methods to produce hetero-dimeric immunoglobulins are known in the art and one of the simplest methods relies on expressing the two distinct immunoglobulin chains in a single cell (WO95/33844, Lindhofer H & Thierfelder S). Without engineering, this straightforward method is limited by the formation of homo-dimeric species over the hetero-dimer of interest (Kufer P et al., (2004) Trends Biotechnol., 22(5): 238-244). When using complementary technologies that will enhance heavy chain hetero-dimerization (Merchant A M et al., (1998) Nat. Biotechnol., 16(7): 677-681), greater hetero-dimer production can be achieved but still results in the production of a significant amount of undesirable homo-dimers (Jackman J et al., (2010) J Biol Chem., 285(27):20850-9, Klein C et al., (2012) MAbs, 4(6):653-63). The present invention therefore utilises the BEAT® technology described method (PCT publication No: WO2012/131555), which is based on a unique concept of bio-mimicry that exhibit superior hetero-dimerisation over prior art methods. The BEAT technology is based on an interface exchange between naturally occurring homo or hetero-dimeric immunoglobulin domain pairs to create new hetero-dimers which can be used as building blocks for Fc-based bispecific antibodies.

[0171] In one aspect, the present invention provides a hetero-dimeric immunoglobulin or fragment thereof comprising first and second polypeptides comprising an engineered immunoglobulin constant region with a modified CH3 domain having a protein-protein interface, wherein the protein-protein interface of the first polypeptide comprises an amino acid substitution at a position selected from the group consisting of: 3, 5, 7, 20, 22, 26, 27, 79, 81, 84, 84.2, 85.1, 86, 88 and 90 (IMGT® numbering), and wherein the protein-protein interface of the second polypeptide comprises an amino acid substitution at position 84.4 and at a position selected from the group consisting of 3, 5, 7, 20, 22, 26, 27, 79, 81, 84, 84.2, 85.1, 86, 88 and 90 (IMGT® numbering).

[0172] In a further embodiment, the present invention provides a hetero-dimeric immunoglobulin or fragment thereof, wherein the first and second polypeptides comprise an engineered immunoglobulin constant region with a modified CH3 domain having a protein-protein interface, wherein the protein-protein interface of the first polypeptide comprises an amino acid substitution at position 88 and at a position selected from the group consisting of: 3, 5, 7, 20, 22, 26, 27, 79, 81, 84, 84.2, 85.1, 86 and 90 (IMGT® numbering), and wherein the protein-protein interface of the second polypeptide comprises an amino acid substitution at position 85.1 and/or 86 and at a position selected from the group consisting of 3, 5, 7, 20, 22, 26, 27, 79, 81, 84, 84.2, 84.4, 88 and 90 (IMGT® numbering), wherein the amino acid residue substituted at position 88 in the first engineered immunoglobulin constant region is interacting with the amino acid residue substituted at position 85.1 and/or 86 in the second engineered immunoglobulin constant region, wherein the amino acid position of each group member is indicated according to the IMGT® numbering.

[0173] Preferably the amino acid residue which is substituted in the protein-protein interface of the first engineered immunoglobulin constant region at position 88 is 88W and conservative amino acid substitutions thereof, wherein the amino acid position is indicated according to IMGT® numbering. More preferably, the amino acid residue which is substituted in the protein-protein interface of the first engineered immunoglobulin constant region at position 88 is 88W and wherein the further amino acid residue substituted in the protein-protein interface of the first engineered immunoglobulin constant region is selected from the group consisting of: 3A, 20V, 20T, 20A, 20N, 20Q, 20E, 20S, 20K, 20W, 22A, 22G, 22T, 22L, 22I, 22V, 26R, 26Q, 26T, 26K, 26V, 26S, 26N, 26E, 79Y, 85.1T, 85.1M, 85.1A, 85.1S, 85.1R, 85.1H, 85.1K, 85.1F, 85.1C, 85.1N, 85.1W, 86S, 86I, 86T, 86H, 86Q, 86V, 86W, 86Y, 86F and 90N, wherein the amino acid position is indicated according to the IMGT⁴ numbering.

[0174] Preferably the amino acid residue which is substituted at position 85 and 86 in the protein-protein interface of the second engineered immunoglobulin constant region is selected from the group consisting of: 85.1A, 85.1S, 85.1C and 86S and conservative amino acid substitutions thereof (IMGT® numbering). More preferably the amino acid residue which is substituted in the protein-protein interface of the second engineered immunoglobulin constant region is selected from the group consisting of: 85.1A, 85.1S, 85.1C and 86S and wherein the further amino acid residue substituted in the protein-protein interface of the second engineered immunoglobulin constant region is selected from the group consisting of: 3E, 5A, 7F, 20T, 22V, 26T, 81D, 84L, 84.2E, 88R and 90R and conservative amino acid substitutions thereof (IMGT® numbering).

[0175] In a preferred embodiment the amino acid residue which is substituted in the protein-protein interface of the first engineered immunoglobulin constant region at position 88 is 88W and wherein the further amino acid residue substituted in the protein-protein interface of the first engineered immunoglobulin constant region is: 3A, 20K, 22V, 26T, 79Y, 85.1S, 86V and 90N and, wherein the amino acid residues which are substituted in the protein-protein interface of the second engineered immunoglobulin constant region at positions 85.1 and 86 are 85.1A, 85.1S or 85.1A and 86S and wherein the further amino acid residue substituted in the protein-protein interface of the second engineered immunoglobulin constant region is: 3E, 5A, 7F, 20T, 22V, 26T, 81D, 84L, 84.2E, 84.4Q, 88R and 90R (IMGT® numbering).

[0176] In an alternative embodiment, the present invention provides a hetero-dimeric immunoglobulin or fragment thereof, wherein the first and second polypeptides comprise an engineered immunoglobulin constant region with a modified CH3 domain having a protein-protein interface, wherein the protein-protein interface of the first polypeptide comprises an amino acid substitution at position 20, and at a position selected from the group consisting of: 3, 5, 7, 22, 26, 27, 79, 81, 84, 84.2, 85.1, 86, 88 and 90 and, wherein the protein-protein interface of the second polypeptide comprises an amino acid substitution at position 26 and at a position selected from the group consisting of: 3, 22, 27, 79, 81, 84, 85.1, 86, and 88, wherein the amino acid residue substituted at position 20 in the first engineered immunoglobulin constant region is interacting with the amino acid residue substituted at position 26 in the second engineered immunoglobulin constant region, wherein the amino acid position of each group member is indicated according to the IMGT® numbering.

[0177] Preferably the amino acid residues which are substituted in the protein-protein interface of the first engineered immunoglobulin chain comprise the amino acid residues at positions 20 and 22, and optionally a further amino acid residue at a position selected from the group consisting of: 3, 5, 7, 26, 27, 79, 81, 84, 84.2, 84.4, 85.1, 86, 88 and 90 and, wherein the amino acid residues which are substituted in the protein-protein interface of the second engineered immunoglobulin chain comprise the amino acid residues at positions 26 and at a further position selected from the group consisting of: 3, 5, 7, 20, 22, 27, 79, 81, 84, 84.2, 84.4, 85.1, 86, 88 and 90, wherein the amino acid position of each group member is indicated according to the IMGT® numbering. Preferably the amino acid residues which are substituted in the protein-protein interface of the first engineered immunoglobulin chain comprise the amino acid residues at positions 20 and 22, and optionally a further amino acid residue at a position selected from the group consisting of: 3, 5, 7, 26, 27, 79, 81, 84, 84.2, 84.4, 85.1, 86, 88 and 90 and, wherein the amino acid residues which are substituted in the protein-protein interface of the second engineered immunoglobulin chain comprise the amino acid residues at positions 26 and 86 and optionally at a further position selected from the group consisting of 3, 5, 7, 20, 22, 27, 79, 81, 84, 84.2, 84.4, 85.1, 88 and 90, wherein the amino acid position of each group member is indicated according to the IMGT® numbering.

[0178] More preferably the amino acid residue which is substituted at position 20 in the protein-protein interface of the first engineered immunoglobulin constant region is selected from the group consisting of 20V, 20T, 20A, 20N, 20Q, 20K, 20S, 20W and 20E and wherein the further amino acid residue substituted in the protein-protein interface of the first engineered immunoglobulin constant region is selected from the group consisting of 3A, 22A, 22G, 22L, 22I, 22V, 22T, 26K, 26R, 26Q, 26T, 26V, 26S, 26N, 26E, 79Y, 85.1W, 85.1F, 85.1T, 85.1M, 85.1A, 85.1S, 85.1R, 85.1H, 85.1K, 85.1C, 85.1N, 86W, 86Y, 86S, 86I, 86H, 86Q, 86V, 86T, 86F, 88Q, 88L, 88V, 88R, 88E, 88T, 88I, 88Y, 88K, 88W and 90N, and wherein the amino acid residue which is substituted at position 26 in the protein-protein interface of the second engineered immunoglobulin constant region is selected from the group consisting of 26T and 26E and conservative amino acid substitutions thereof, wherein the amino acid position is indicated according to the IMGT® numbering.

[0179] In a most preferred embodiment the amino acid residue which is substituted in the protein-protein interface of the first engineered immunoglobulin constant region at position 20 is 20K and wherein the further amino acid residue substituted in the protein-protein interface of the first engineered immunoglobulin constant region is 3A, 22V, 26T, 79Y, 85.1S, 86V, 88W and 90N and, wherein the amino acid residues which are substituted in the protein-protein interface of the second engineered immunoglobulin constant region at position 26 is 26T and wherein the further amino acid residue substituted in the protein-protein interface of the second engineered immunoglobulin constant region is 3E, 5A, 7F, 20T, 22V, 81D, 84L, 84.2E, 84.4Q, 85.1C/S/A, 86S, 88R and 90R (IMGT® numbering).

[0180] Development of hetero-dimeric immunoglobulins targeting CD3 and a disease associated antigen

[0181] As a first step (Example 1), the substitutions that reduce or abrogate binding to Protein A were assayed in homo-dimeric immunoglobulins based on FAB or scFv fragments. It was found that the presence of a variable heavy chain domain of the VH3 subclass within the heavy chain which has substitutions for reduced or no binding to Protein A, hampers any differential affinity methods based on Protein A. Solutions to these major impediments were found in the forms of framework substitutions that reduce or abrogate Protein A binding to the VH3 subclass for the differential affinity methods based on Protein A.

[0182] In a second step (Example 2.1), a humanised antibody targeting the human CD3 (epsilon subunit) was generated by grafting the CDRs of a murine anti-CD3 antibody onto IGVH3-23 and IGVK1 or IGVK3 human germline frameworks. The best humanised variants had the Protein A binding site present in their VH domain abrogated using a G65S or N82aS substitution (Kabat numbering). These variants were formatted as FAB or scFv fragments.

[0183] In a third step, antigen binding sites of antibodies targeting disease associated antigens were generated. CDRs of murine antibodies could be grafted onto the human germline frameworks IGVH3-23 and IGVK1 (Examples 2.3, 2.4 and 2.6-2.10). Alternatively CDRs of antibodies isolated from phage display libraries could be based on the VH3 variable domain subclass or grafted onto the human germline frameworks IGVH3-23 and IGVK1 (Examples 2.5 and 2.6). The Protein A binding site in the VH domain of the epitope binding region was abrogated using the G65S or N82aS substitutions (Kabat numbering).

[0184] In a fourth step, hetero-dimeric antibodies were produced based on the BEAT® technology (as described in WO2012/131555) in which the anti-CD3 antibody from Example 2.1 and the epitope binding region of the disease associated antigen as described in Examples 2.2-2.10 were used in an scFv-FAB format or vice versa (Example 3.1). Since a difference in the number of Protein A binding sites between homo- and hetero-dimeric species can be used to isolate the hetero-dimeric species by Protein A chromatography, the bispecific antibodies of the present invention were engineered to result in one of the two homo-dimeric species having no Protein A binding site and therefore no binding to Protein A resin. Furthermore, in order to improve the safety profile of the BEAT antibodies, the Fc receptor binding was reduced or eliminated by engineering the two substitutions L234A and L235A (EU numbering) into the lower hinge region of the Fc region.

### EXAMPLES

### Materials and Methods

### Construction of Expression Vectors for Transient Mammalian Cell Expression

[0185] cDNAs encoding the different polypeptide chains in part or in full were first gene synthetized by GENEART AG (Regensburg, Germany) and modified using standard molecular biology techniques. PCR products were digested with appropriate DNA restriction enzymes, purified and ligated in a modified pcDNA3.1 plasmid (Invitrogen AG, Zug, Switzerland) carrying a CMV promoter and a bovine hormone poly-adenylation (poly(A)) previously digested with the same DNA restriction enzymes. All polypeptide chains were independently ligated in this expression vector where secretion was driven by the murine VJ2C leader peptide.

### Expression of Recombinant Proteins

[0186] Antibodies, ScFv-Fc fusion proteins, BEAT antibodies and antigens were expressed as described below unless otherwise indicated. For transient expression, equal quantities of each engineered chains vectors were co-transfected into suspension-adapted HEK293-EBNA cells (ATCC-LGL standards, Teddington, UK; Cat. No: CRL-10852) using Polyethyleneimine (PEI; Sigma, Buchs, Switzerland). Typically, 100 ml of cells in suspension at a density of 0.8-1.2 million cells per ml is transfected with a DNA-PEI mixture. When recombinant expression vectors encoding each engineered chain genes are introduced into the host cells, the immunoglobulin construct is produced by further culturing the cells for a period of 4 to 5 days to allow for secretion into the culture medium (EX-CELL 293, HEK293-serum-free medium (Sigma), supplemented with 0.1% pluronic acid, 4 mM glutamine and 0.25 μg/ml geneticin). Cell-free culture supernatants containing the secreted immunoglobulins were prepared by centrifugation followed by sterile filtration and used for further analysis.

### Differential Protein A Affinity Chromatography (Example 1)

[0187] Purification of Fc 133 Fragment and Homo-Dimeric scFv-Fc Immunoglobulins

### Capture-Elution Mode Chromatography

[0188] Supernatants were conditioned with 0.1 volume (V) of 1M Tris-HCl pH 8.0 prior purification. Protein G Sepharose™ 4 Fast Flow (GE Healthcare Europe GmbH, Glattbrugg, Switzerland; catalogue number 17-0618-01) was added to conditioned supernatants. Mixtures were incubated overnight at 4° C. After incubation, bound proteins were washed with 10CVs of PBS pH 7.4, eluted with 4 column volumes (CVs) of 0.1 M Glycine pH 3.0 and neutralised with 0.1V of 1M Tris-HCl pH8.0. Supernatant, flow through and elution fractions were analysed under non-reduced conditions by SDS-PAGE (NuPAGE Bis-Tris 4-12% acrylamide, Invitrogen AG, Basel, Switzerland).

### Gradient Mode Chromatography

[0189] Post production, cell-culture supernatants containing the Fc 133 fragment were first purified in capture-elution mode chromatography using Protein G Sepharose™ 4 Fast Flow (above). Eluted material from capture-elution mode chromatography were subsequently loaded onto a 1 ml HiTrap™ MabSelect SuRe™ Protein A column (Protein A binding site mutants). The column was pre-equilibrated in 0.2M phosphate citrate buffer pH 8.0 and operated on an ÄKTApurifier™ chromatography system (both column and instrument from GE Healthcare Europe GmbH; column catalogue No: 11-0034-93) at a flow rate of 1 ml/min. Elution was performed with a pH linear gradient combining various amounts of two buffers (running buffer (A): 0.2M phosphate citrate buffer pH 8.0 and elution buffer (B): 0.04M phosphate citrate buffer pH 3.0. The linear gradient went from 0% B to 100% B in five column volumes (CVs). Eluted fractions were neutralised with 0.1V of 1M Tris-HCl pH 8.0. Supernatant, flow through and elution fractions were analysed under non-reduced conditions by SDS-PAGE (NuPAGE Bis-Tris 4-12% acrylamide, Invitrogen AG, Basel, Switzerland).

### Purification of Homo-Dimeric FAB-Fc Immunoglobulins and FAB Fragments.

[0190] Post production, cell culture supernatants were conditioned with 0.1V of 1M Tris-HCl pH 8.0. Protein L resin (Genescript, Piscataway, USA) was added to the conditioned supernatant and incubated overnight at 4° C. After incubation, bound proteins were washed with ten CVs of PBS pH7.4, eluted with 4CVs of 0.1M Glycine pH 3.0, and finally neutralised with 0.1V of 1M Tris-HCl pH 8.0. To assess Protein A binding, Protein L purified FAB were injected on a 1 ml HiTrap MabSelect™ column (GE Healthcare Europe GmbH, Glattbrugg, Switzerland) at pH8.0 (Citric acid/Na₂HPO₄ buffer). Elution was performed with a pH linear gradient combining various amounts of two buffers (running buffer (A): 0.2 M phosphate citrate buffer pH8.0 and elution buffer (B): 0.04 M phosphate citrate buffer pH3.0). The linear gradient went from 0% B to 100% B in 5CVs. Eluted fractions were neutralised with 0.1V of 1M Tris-HCl pH8.0. Supernatant, flow through and elution fractions were analysed under non-reduced conditions by SDS-PAGE (NuPAGE Bis-Tris 4-12% acrylamide, Invitrogen AG, Basel, Switzerland).

Purification and Testing of VH3 Based Homo-Dimeric FAB-Fc and scFv-Fc Immunoglobulins Abrogated for Protein A Binding in their Fc and VH3 Domains.

[0191] Purification scheme included a capture-elution mode chromatography followed by a gradient mode chromatography according to the procedure described above.

### Differential Protein A Affinity Chromatography (Examples 1 & 3)

[0192] Post production, cell-free supernatants were loaded onto a 1 ml HiTrap™ MabSelect SuRe™ Protein A column pre-equilibrated in 0.2M phosphate citrate buffer pH 6.0 and operated on an ÄKTApurifier™ chromatography system (both from GE Healthcare Europe GmbH; column Cat. No: 11-0034-93) at a flow rate of 1 ml/min. Running buffer was 0.2 M phosphate citrate buffer pH 6. Elution of the hetero-dimer of interest was performed using 20 mM sodium citrate buffer pH 4 whilst homo-dimeric species were eluted with 0.1 M glycine, pH3.0. Elution was followed by OD reading at 280 nm; fraction containing the hetero-dimer of interest were pooled and neutralized with 0.1 volume of 1M Tris pH 8.0 (Sigma). Supernatant, flow through and elution fractions were analysed under non-reduced conditions by SDS-PAGE (NuPAGE Bis-Tris 4-12% acrylamide, Invitrogen AG, Basel, Switzerland).

### Differential Scanning Calorimetry (DSC)

[0193] The thermal stabilities of antibodies were compared using calorimetric measurements. Calorimetric measurements were carried out on a VP-DSC differential scanning microcalorimeter (MicroCal-GE Healthcare Europe GmbH, Glattbrugg, Switzerland). The cell volume was 0.128 ml, the heating rate was 1° C./min and the excess pressure was kept at 64 p.s.i. All protein fragments were used at a concentration of 1-0.5 mg/ml in PBS (pH 7.4). The molar heat capacity of each protein was estimated by comparison with duplicate samples containing identical buffer from which the protein had been omitted. The partial molar heat capacities and melting curves were analysed using standard procedures. Thermograms were baseline corrected and concentration normalized before being further analysed using a Non-Two State model in the software Origin v7.0.

[0194] The expected melting profiles for the human IgG subclasses are known (Garber E & Demarest S J (2007) Biochem Biophys Res Commun, 355(3): 751-7) and all profiles have been shown to contain three unfolding transitions corresponding to the independent unfolding of the CH2, CH3 and FAB domains. Of the four human IgG subclasses, IGHG1 has the most stable CH3 domain (˜85° C.); while other subclasses CH3 domains are less stable, although none are known to melt below 70° C. Similarly, all subclasses are known to have a melting temperature of ˜70° C. for the CH2 domain.

### Purity Assessment by Capillary Gel Electrophoresis (Example 3.2)

### Non-Reduced Sample Preparation

[0195] 40 μg of desalted protein sample was buffered in SDS sample buffer (Beckman Coulter International S.A., Nyon, Switzerland; IgG Purity Kit, Cat. No: A10663) containing 5 mM Iodoacetamide (Sigma). A 10-kDa internal standard was added to the samples. The sample-mixtures were heated at 70° C. for 10 min.

### Capillary Gel Electrophoresis

[0196] Following sample preparation, samples were run on a ProteomeLab PA 800 (Beckman Coulter International S.A., Nyon, Switzerland) fitted with a photodiode array detector (DAD) set at 220 nm. Bare-fused silica capillaries of 50 μm ID×30.2 cm (20.2 cm effective length to detector) were used as separation medium. Sample injection and separation were performed at constant voltages of 5 and 15 kV, respectively, with reverse polarity in SDS-molecular weight gel buffer. The data were recorded at a rate of 2 Hz and current was stable during separation. Capillary and samples were thermo-stated at 25° C.

### Affinity Measurements by SPR (Example 1)

### SPR Testing of FAB Fragments Abrogated for Protein A Binding

[0197] cDNA encoding the human HER2 extracellular region fused to an IGHG1 Fc fragment was cloned into an expression vector similar to the heavy and light expression vectors described above and transiently transfected in HEK293E cells using the PEI method (see PCT Publication No: WO2012131555). Supernatants were conditioned with 0.1V of 1 M Tris-HCl pH8.0 and the antigen purified by Protein A capture-elution chromatography as described in Example 1. For SPR experiments, a monoclonal mouse anti-human IgG (Fc) antibody sensor chip was used, this allowed for the capture the Fc fused recombinant HER2 antigen in the correct orientation (Human Antibody Capture Kit, catalogue number BR-1008-39, GE Healthcare Europe GmbH). Measurements were recorded on a BIAcore™ 2000 instrument (GE Healthcare Europe GmbH, Glattbrugg, Switzerland). Different dilutions of anti-HER2 FAB (50, 25, 12.5, 6.25, 3.13, 1.57, 0.78, 0.39 nM) were injected over the sensor chip for 4 min at 30 μl/min. For each measurement, after seven minutes of dissociation, a 3M MgCl₂ solution was injected for 1 min at 30 μl/min for regeneration. Data (sensorgram: fc2-fc1) were fitted with a 1:1 Langmuir. To account for the experimental variations in captured HER2-Fc at the beginning of each measurement, the Rmax value was set to local in all fits. Measurements were performed in duplicate, and included zero-concentration samples for referencing. Both Chi2 and residual values were used to evaluate the quality of a fit between the experimental data and individual binding models.

Affinity measurements by SPR (Examples 2 & 3)

[0198] SPR analysis was used to measure the association and dissociation rate constants for the binding kinetics of the different antibodies (murine and humanized antibodies). The binding kinetics of antibodies were measured on a BIAcore 2000 instrument (BIAcore-GE Healthcare Europe GmbH, Glattbrugg, Switzerland) at room temperature and analysed with the BiaEvaluation software (version 4.1, BIAcore-GE Healthcare Europe GmbH). Measurements were performed on CM5 sensor chips (GE Healthcare Europe GmbH, Cat. No: BR-1000-14) individually coupled with the ligand of interest using a commercial amine coupling kit (GE Healthcare Europe GmbH, Cat. No: BR-1000-50). Protein G ligand was from Pierce (Thermo Fisher Scientific-Perbio Science S.A., Lausanne, Switzerland, Cat. No: 21193).

[0199] Data (sensorgram: fc2-fc1) were fitted with a 1:1 Langmuir model with or without mass transfer as indicated. In capture experiments, to account for the experimental variations in at the beginning of each measurement, the Rmax value was set to local in all fits. Dissociation times were of at least 350 seconds. Measurements were performed in triplicate and included zero-concentration samples for referencing. Both Chi2 and residual values were used to evaluate the quality of a fit between the experimental data and individual binding models.

### Affinity Measurements on HPB-ALL Cells by FACS

[0200] HPB-ALL cells (DSMZ, Braunschweig, Germany, Cat. No: ACC483) were used as CD3 positive cell line for FACS staining. HPB-ALL were maintained in RPMI 1640 supplemented with 10% FCS and 100 U/ml Penicillin and 100 ug/ml streptomycin. 100 μl dilution series of the chimeric OKT3 antibody and humanized variants were incubated with 4×10⁵ HPB-all cells in PBS supplemented with 1% BSA and 0.1% Sodium Azide (referred as FACS buffer) for 45 min on ice. An irrelevant human IgG1 was used as isotype control and the chimeric OKT3 antibody as positive control. After washing, cells were incubated with a 1/200 dilution of anti-Human Fc-PE (EBioscience, Vienna, Austria) for 45 min on ice. Cells were then washed again and resuspended in 200 ul FACS buffer. The relative mean fluorescence of each sample was measured on FACSCalibur (BD Biosciences, Allschwil, Switzerland) Results are summarized in FIG. 9 as the relative staining of HBP-ALL compared to the chimeric OKT3 antibody.

### Cell-Lines for In Vitro Assays

### Human HER2 Positive Cell Lines

[0201] Human cells expressing HER2 antigen have been described in PCT Publication No: WO2010108127. HER2 positive human cell lines as used herein were as follows:

BT474 (ATCC-LGL standards; Cat. No: HTB-20)

[0202] Culture conditions: RPMI medium supplemented with 10% heat-inactivated FBS, 1% penicillin-streptomycin (Invitrogen AG, Cat. No: 10378-016), 1% sodium pyruvate solution (PAA Laboratories, Pasching, Austria; Cat. No: S11-003), 1% MEM Non-Essential Amino Acids (PAA Laboratories, Cat. No: M11-00dsmz3) and 1% GlutaMAX-1 (Invitrogen AG, Cat. No: 35050-038) in 150 cm² tissue culture flask (TPP, Trasadingen, Switzerland; Cat. No: 90150). Cells were passaged twice per week.

JIMT-1 (DSMZ, Braunschweig, Germany, Cat. No: ACC589)

[0203] Culture conditions: Dulbeco's modified essential medium (DMEM (1×))+GlutaMAX-1 (Invitrogen AG, Cat. No: 31966-012), supplemented with 10% heat-inactivated FBS, 1% penicillin-streptomycin (Invitrogen AG, Cat. No: 10378-016), 1% sodium pyruvate solution (PAA Laboratories, Cat. No: S11-003), 1% MEM Non-Essential Amino Acids (PAA Laboratories, Cat. No: M11-003) and 1% GlutaMAX-1 (Invitrogen AG, Cat. No: 35050-038). Cells were passaged 2-3 times per week.

MDA-MB-231 (ATCC-LGL standards; Cat. No: HTB-26).

[0204] Culture conditions: same culture conditions as JIMT-1.

HT-1080 (ATCC-LGL standards; Cat. No: CCL-121).

[0205] Culture conditions: HT1080 cells are cultured in EMEM medium supplemented with 10% heat-inactivated FBS, 1% penicillin-streptomycin (Invitrogen AG, Cat. No: 10378-016), and 1% glutamine (Invitrogen AG, Cat. No: 25030-024). The cells are cultured at split three times a week (1 in 6 dilution).

NCI-N87 (ATCC-LGL standards; Cat. No: CRL-5822).

[0206] Culture conditions: NCI-N87 cells are cultured in RPMI 1640 medium with 10% heat-inactivated FBS, 1% penicillin-streptomycin (Invitrogen AG, Cat. No: 10378-016), 1% sodium pyruvate solution (PAA Laboratories, Pasching, Austria; Cat. No: S11-003), 1% MEM Non-Essential Amino Acids (PAA Laboratories, Cat. No: M11-00dsmz3), and 1% glutamine (Invitrogen AG, Cat. No: 25030-024). The cells are split twice a week (1 in 3 dilution).

### Human CD38 Positive Cell Lines

[0207] Human cells expressing CD38 antigen have been described in PCT Publication Nos: WO2005103083, WO2008047242, WO2011154453 and WO2012092612. CD38 positive human cell lines as used herein were as follows: Stable recombinant CHO[CD38] cells

[0208] A gene coding for human CD38 was ordered at Source Biosciences (Berlin, Germany, Cat.-No.: IRAU37D11, 4309086). Human CD38 was amplified using primers adding a kozak sequence, a start codon followed by a signal peptide (murine V leader) to the 5′ end and a NheI restriction site to the 3′ end. The amplicon was cut using NheI and HindIII and cloned into the expression cassette of pT1, a pcDNA3.1 (Invitrogen AG) derived vector developed in-house. The expression cassette of pT1 links the expression of the gene of interest with expression of GFP and PAC (the gene for puromycin resistance) using two IRES (internal ribosome entry sites) on a polycistronic mRNA. A midiprep of the plasmid was prepared and the cloned CD38 open reading frame was confirmed by DNA sequencing. Suspension CHO-S cells (Invitrogen AG) were transfected using polyethyleneimine (JetPEI®, Polyplus-transfection, Illkirch, France) in 50 ml bioreactor format (TubeSpin 50 bioreactors, TPP, Trasadingen, Switzerland). For this purpose, exponential growing cells were seeded in OptiMEM medium (Invitrogen AG, Cat. No.: 31985-047). A JetPEI®:DNA complex was added to the cells. After 5 h incubation of the cells with the JetPEI®:DNA complex at 37° C. under shaking (200 RPM) for endocytosis, one volume of culture medium PowerCHO2 (Lonza, distributor RUWAG Lifescience, Bettlach. Switzerland, Cat. No:BE12-771Q) supplemented with 4 mM Gin was added to the cell suspension. The cells were then incubated on a shaken platform at 37° C., 5% CO2 and 80% humidity. One day after transfection the cells were seeded in 96 well plates at different concentrations in selective medium containing puromycin (Sigma, Cat. No: P8833-25 mg). After approximately 14 days of selection under static conditions, 46 high GFP expressing cell pools were expanded as suspension cultures using TubeSpin 50 bioreactors. Once successfully adapted to suspension, the cells were analysed for CD38 by FACS. Stable CHO[CD38] clones with a homogenous CD38 staining profile were selected and used herein.

[0209] Other CD38 positive cell lines included:

NCI-H929 (ATCC-LGL standards; Cat. No: CRL-9068).
Namalwa (ATCC-LGL standards; Cat. No: CRL-1432)
U266 (ATCC-LGL standards; Cat. No: TIB-196)
RPMI 8226 (ATCC-LGL standards; Cat. No: CCL-155)

[0210] Culture conditions: RPMI 1640 medium supplemented with 10% heat-inactivated FBS, 1% penicillin-streptomycin (Invitrogen AG) and 1% GlutaMAX-1 (Invitrogen AG)

Raji (ATCC-LGL standards; Cat. No: CCL-86)
Daudi (ATCC-LGL standards; Cat. No: CCL-213)

### Human OX40 Positive Cell Lines

[0211] Human cells expressing OX40 antigen have been described in PCT Publication No: WO2013008171.

[0212] Peripheral blood mononuclear cells (PBMCs) and HBP-ALL are examples of human OX40 positive cell lines.

[0213] Stable recombinant CHO[OX40] cells were used herein. A recombinant CHO cell line carrying a synthetic cDNA coding for human OX40 was engineered using a similar protocol to that of the stable recombinant CHO[CD38] cell line described above.

### Human CD20 Positive Cell Lines

[0214] Human cells expressing CD20 antigen have been described in PCT Publications No: WO2010095031. An example of CD20+ cancer cells is the Daudi cancer cell-line (ATCC-LGL standards; Cat. No: CCL-213), these B lymphoblast cancer cells are cultured in RPMI 1640 medium (Sigma) supplemented with 20% FBS and 1% P/S; 1% L-Glut; 1% Na-Pyr and 1% NEAA. The cells are cultured at 37° C. with 5% CO2 supplementation.

### Human EGFR Positive Cell Lines

[0215] Human cells expressing EGFR antigen have been described in PCT Publication No: WO2010108127. An example of EGFR+ cancer cells is the HT-29 cancer cell-line (ATCC-LGL standards; Cat. No: HTB-38), these colorectal cancer cells are cultured are cultured in McCoy's 5A medium (Sigma) supplemented with 10% FBS and 1% P/S; 1% L-Glut; 1% Na-Pyr and 1% NEAA. The cells are cultured at 37° C. with 5% CO2 supplementation.

### Human CD19 Positive Cell Lines

[0216] Human cells expressing CD19 antigen have been described in PCT Publication No: WO2010/095031. Namalwa (ATCC-LGL standards; Cat. No: CRL-1432) and Raji (ATCC-LGL standards; Cat. No: CCL-86) are examples of human CD20 positive cell lines.

### Human Membrane IgE Positive Cell Lines

[0217] PCT Publication No: WO2010/033736 on page 71 describes a method to class switch human PBMCs into IgE producing B cells by adding interleukin-4 (IL-4) and anti-CD40 antibody.

### Recombinant Target Antigens

### Human CD3 Gamma-Epsilon-Fc Fusion Protein

[0218] A cDNA encoding the human CD3 gamma extracellular region (UniProt accession No: P09693 residues 23-103 (SEQ ID NO: 184); UniProt Consortium (2013) Nucleic Acids Res., 41(Database issue): D43-7; http://www.uniprot.org/) fused to the human CD3 epsilon extracellular region (UniProt accession No: P07766, residues 22-118 (SEQ ID NO: 185)) by a 26-residue peptide linker (sequence: GSADDAKKDAAKKDDAKKDDAKKDGS; SEQ ID NO: 186) was first synthetized by GENEART AG (Regensburg, Germany). This synthetic gene was fused to a human IgG1 Fc portion using standard overlap PCR techniques and a human IgG1 Fc cDNA template also obtain from Geneart AG. The resulting cDNA was cloned in the modified pcDNA3.1 plasmid mentioned above.

[0219] For transient expression of the CD3 gamma-epsilon-Fc protein (SEQ ID NO: 187), the recombinant vector was transfected into suspension-adapted HEK-EBNA cells (ATCC-CRL-10852) using Polyethyleneimine (PEI) as described above. The CD3 gamma-epsilon-Fc construct was then purified from cell-free supernatant using recombinant Streamline rProtein A media (GE Healthcare Europe GmbH, Glattbrugg, Switzerland) and used for further analysis.

### Human and Cynomolgus Monkey CD3 Epsilon 1-26_Fc Fusion Proteins

[0220] A cDNA encoding the human CD3 epsilon peptide 1-26 (UniProt accession No: P07766, amino acids 23-48, SEQ ID NO: 188) and a cDNA encoding the cynomolgus CD3 epsilon peptide 1-26 (UniProt accession No: Q95L15, amino acids 22-47, SEQ ID NO: 189) were PCR amplified from synthetic cDNAs obtained from GENEART A.G. for the human and cynomolgus monkey CD3 epsilon extracellular regions, respectively. The amplified products were subsequently fused to a human IgG1 Fc portion using standard overlap PCR techniques. The human IgG1 Fc cDNA template was obtained from Geneart AG. The resulting cDNA were cloned in the modified pcDNA3.1 plasmid mentioned above.

[0221] For transient expression of human and cynomolgus CD3 epsilon constructs (SEQ ID NO: 190 and 191, respectively), the recombinant vectors were transfected into suspension-adapted HEK-EBNA cells (ATCC-CRL-10852) using Polyethyleneimine (PEI) as described above. The CD3 epsilon fusion constructs were then purified from cell-free supernatant using recombinant Streamline rProtein A media (GE Healthcare Europe GmbH, Glattbrugg, Switzerland) and used for further analysis. These two fusion proteins are referred herein as the human and cynomolgus monkey CD3 epsilon 1-26_Fc fusion proteins.

### Human HER2 Extracellular Region

[0222] Preparations of HER2 soluble extracellular region have been described in PCT Publication No: WO2012131555. Human HER2 soluble extracellular region fused to a poly-histidine tag (referred herein as HER2-his) or fused to a human IgG1 Fc region (referred herein as HER2-Fc) were prepared.

### Human and Cynomolgus Monkey CD38 Extracellular Regions

[0223] A cDNA for human CD38 was obtained from Source Biosciences (Erwin-Negelein-Haus, Germany, Cat. No.: IRAU37D11, 4309086), its extracellular region (UniProt accession No: P28907 residues 43-300) was PCR amplified and cloned into an in-house expression vector derived from pcDNA3.1 (Invitrogen AG). This expression vector encompassed a kozak sequence and a start codon followed by the murine VJ2C leader peptide to the 5′ end and a 6-His-tag to the 3′ end of its multiple cloning site. The soluble extracellular region of human CD38 fused to a 6-His-tag (SEQ ID NO: 192) was expressed and purified as follows: one volume of RPMI 1640 medium (PAA Laboratories, Cat. No: E15-039) containing HEK cells, 0.1% pluronic acid (Invitrogen AG), expression vector and polyethylenimine (JetPEI®, Polyplus-transfection, Illkirch, France) was incubated in a shaker flask at 37° C., 5% CO₂ and 80% humidity. One volume of ExCell293 medium supplemented with 6 mM glutamine was added to the mixture after 4 hours and incubation continued further for a total of 5 days. Post production, cell-free supernatant was prepared by centrifugation and filtrated using 0.2 μm filters, pH was adjusted at 7.4 (4° C.) using Tris 1 M pH 8.7. Ni-Sepharose Excell beads (GE Healthcare, Cat. No: 17-3712-03) were added to the solution and incubated overnight at 4° C. under agitation. The solution was loaded on an Econo-Column (Bio-Rad Laboratories AG, Reinach, Switzerland, Cat. No: 737-4252) for gravity-flow purification. The beads were washed in PBS (2×), 20 mM imidazole and the protein was eluted in PBS, 500 mM Imidazole. Eluted fractions were pooled and buffer exchanged for PBS with two dialysis steps at 4° C. The purified human CD38 extracellular region was filtrated using 0.22 μm syringe filters. Using the methods as described above the soluble extracellular region of cynomolgus monkey CD38 antigen fused to a 6-His-tag (SEQ ID NO: 193) was cloned, expressed and purified.

### Human OX40 Extracellular Region

[0224] A method to prepare the soluble extracellular region of human OX40 has been described in PCT Publication No: WO2013008171.

### Human EGFR Extracellular Region

[0225] An example of EGFR soluble extracellular region antigen preparation has been described in PCT Publication No: WO2012131555.

### In Vitro T Cell Redirection Killing Assay

### Preparation of Peripheral Blood Mononuclear Cells

[0226] To produce peripheral blood mononuclear cells (PBMCs), blood filters containing human leukocytes were collected from the Blood Collection Centre in La Chaux-de-Fonds, Switzerland (Centre de Transfusion Sanguine et Laboratoire de Serologie, rue Sophie-Mairet 29, CH-2300). Cells were removed from the filters by back-flushing with 60 ml of PBS containing 10 U/ml of liquemin (Drossapharm AG, Lucern, Switzerland). PBMCs were then purified with 50 mL Blood-Sep-Filter Tubes (Brunschwig, Basel, Switzerland) following manufacturer's instructions. Tubes were centrifuged for 20 min at 800 g at room temperature (without brake) and the cells were collected from the interface. Cells were washed 3× with Roswell Park Memorial Institute (RPMI, PAA Laboratories, Pasching, Austria) medium without FBS or phosphate buffered Saline (PBS). PBMCs were resuspended at 10e6 cells/mL in RDL medium (RPMI supplemented with 10% heat inactivated Fetal bovine serum (FBS) and penicillin/streptomycin) and were cultured overnight at 37° C. in a 5% CO₂ incubator prior to the assay.

### T Cell Preparations

[0227] T cell purification was performed directly after the PBMC isolation using pan-T cell isolation kit II (Myltenyi Biotec GmbH, Bergisch Gladbach, Germany, Cat. No: 130-091-156) following manufacturer's instructions. After purification, T cells were resuspended at 10e6 cells/mL in RDL medium and cultured overnight at 37° C. in a 5% CO₂ incubator prior assay.

### Assay Readouts

[0228] Two different readouts which gave highly comparable results were used to quantify the redirected killing. A flow cytometry method, referred herein as RDL-FACS method, based on fluorescence-cytometry as described in Schlereth B et al. ((2005) Cancer Res, 65: 2882-2889), Moore P A et al. ((2011) Blood, 117(17): 4542-51) and Friedrich M et al. ((2012) Mol Cancer Ther, 11: 2664-2673). Target cells were harvested, counted, washed once and resuspended at 5×10e6 cells/mL in PBS+1 μM Carboxyfluorescein succinimidyl ester (CFSE, Sigma). Cells were incubated 15 min at 37° C. with gentle agitation every 5 min. CFSE loaded cells were washed 3× with RDL medium and resuspended at 2×10e5 cells/mL in RDL medium. PBMCs were harvested, counted and resuspended at 2×10e6 cells/mL in RDL medium. Antibodies serial dilutions (3× solutions) were prepared in RDL medium. Target cells (50 μl/well), T cells (50 μl/well) and 3× antibody solutions (50 μl/well) were distributed in flat-bottom 96-well plate (TPP, Trasadingen, Switzerland). The effector:target ratio was 10:1. The plates were incubated for 48 h in a 5% CO₂ incubator at 37° C. After incubation the plates were centrifuged for 3 min at 300 g, the supernatants were discarded by flicking the plates. The plates were washed once with 200 μl of PBS, centrifuged again and the PBS was discarded. A pre-warmed solution of accutase (Invitrogen AG) was added and the plates were incubated 10 min at 37° C. The detached adherent cells were resuspended by pipetting up and down after addition of 100 μL of RDL medium. The solution was transferred into a U-bottom 96-well plate (TPP). The U-bottom plates were centrifuged for 3 min at 300 g, the supernatants were discarded and the cells were resuspended in 200 μl of cold FACS buffer (PBS+2% FBS+10% Versene) supplemented with 7-AAD (Becton Dickinson AG, Allschwil, Switzerland) at a 1/40 dilution. The plates were immediately acquired on a Guava easyCyte™ Flow Cytometer (Millipore AG, Zug, Switzerland). For each well, the absolute number of living target cells was determined by gating on CFSE positive 7ADD negative population using Flowjo® software (Miltenyi Biotec GmbH, Bergisch Gladbach, Germany). The percentage of specific cytotoxicity for each sample was determined using the condition in which only target cells were incubated as baseline. The EC₅₀ values were determined using nonlinear variable slope regression method with Prism software (GraphPad software, La Jolla, Calif., USA). The percentage of specific re-directed lysis (RDL) was calculated by subtracting the percentage of specific cytotoxicity of the condition without antibody to the conditions where a test antibody was added.

[0229] A cell viability method, referred herein as RDL-MTS method based on a colorimetric method to assess cell viability as described in in Bühler P et al. ((2008) Cancer Immunol Immunother, 57: 43-52, Labrijn A F et al. ((2013) Proc Natl Acad Sci USA, 110(13): 5145-50) and PCT Publication No: WO2012143524. Target cells were harvested, counted, washed once and resuspended at 2×10e5 cells/ml in RDL medium. PBMCs were harvested, counted and resuspended at 2×10e6 cells/mL in RDL medium. Antibodies serial dilutions (3× solutions) were prepared in RDL medium. Target cells (50 μl/well), T cells (50 μl/well) and 3× antibody solutions (50 μl/well) were distributed in flat-bottom 96-well plate (TPP). The effector:target ratio was 10:1. The plates were incubated for 48 h in a 5% CO₂ incubator at 37° C. After incubation the supernatants were discarded and the plates were washed 3 times with 200 μL of PBS to remove the PBMCs and 100 μl of RDL medium was then added to each well. The readout was done using CellTiter 96® kit (Promega AG, Dübendorf, Switzerland) according to manufacturer's instructions. Briefly, 10-20 μl of MTS reagent was added to each well and the plates were incubated 2-6 h in a 5% CO₂ incubator at 37° C. The 490 nm absorbance was then read on a BioTek synergy plate reader (BioTek AG, Luzern, Switzerland). The percentage of specific killing was calculated using this formula: Specific killing=100×[(SD−Sp)/(SD−MD)]. SD is the absorbance measured in spontaneous death condition where target cells were incubated alone. Sp is the absorbance measured in each test condition (target cells+PBMCs+antibody). MD is the absorbance measured in the maximum death condition in which target cells were lysed by 3 freeze and thaw cycles. The percentage of specific redirected lysis (RDL) was calculated by subtracting the percentage specific cytotoxicity of the condition without antibody to the conditions where a test antibody was added. The EC₅₀ values were determined using nonlinear variable slope regression method with Prism software (GraphPad software).

### Xenograft Model

### JIMT-1 Xenografts

### Cells Lines and Reagents

[0230] Breast carcinoma JIMT-1 cell line was obtained from DSMZ (Cat. No: ACC589). Cells were maintained in DMEM (IX) with GlutaMAX™-1 (Invitrogen AG, Cat. No: 31966-021) supplemented with 10% heat-inactivated fetal bovine serum (FBS) (AMIMED, London, UK, Cat. No: Z10834P), 1% penicillin-streptomycin (Invitrogen AG, Cat. No: 10378-016), 1% sodium pyruvate solution (PAA Laboratories, Cat. No: S11-003), 1% MEM Non-Essential Amino Acids (PAA Laboratories, Cat. No: M11-003) and 1% GlutaMAX™-1 (Invitrogen AG, Cat. No: 35050-038). Cells were split twice a week with StemPro Accutase (Invitrogen AG, Cat. No: A11105-01).

[0231] Peripheral blood mononuclear cells (PMBC) were collected from blood filters containing human leukocytes from the Blood Collection Centre in La Chaux-de-Fonds, Switzerland (Centre de Transfusion Sanguine et Laboratoire de Serologie, rue Sophie-Mairet 29, CH-2300). Cells were removed from the filters by back flushing with 60 ml of PBS containing 10 U/mL of liquemin (Drossapharm AG, Lucern, Switzerland). PBMCs were then isolated with 50 ml Blood-Sep-Filter Tubes (Brunschwig, Basel, Switzerland) following manufacturer's instructions: tubes were centrifuged 20 min at 800 g at RT (without brake) and the cells were collected from the interface. Cells were washed 3 times with Roswell Park Memorial Institute medium without FBS (RPMI, Invitrogen AG, Cat. No: 21875-091). PBMCs were resuspended at 10e6 cells/ml in RPMI medium supplemented with 10% FBS (AMIMED), 1% penicillin-streptomycin (Invitrogen AG) and were cultured overnight at 37° C. under 5% CO₂. Target cells were harvested, counted, washed once and resuspended at 5×10e6 cells/ml in PBS.

### Mice and Experimental Conditions

[0232] In vivo experiments were performed in 5-week-old immunodeficient NOD.CB17/AlhnRj-Prkdcscid/Rj (NOD/SCID) female mice characterized by T cell, B cell and natural killer cell deficiency (Janvier Labs, St Berthevin, France). The mice were maintained under sterile and standardized environmental conditions in standard rodent micro-isolator cages (20+/−1° C. room temperature, 50±10% relative humidity, 12 hours light dark rhythm). Mice received irradiated food, bedding and 0.22 μm-filtered drinking water. All experiments were done according to the Swiss Animal Protection Law with permission from the responsible cantonal authorities (Neuchatel Canton, Switzerland). In compliance with the Animal Protection Law, mice had to be euthanized when tumor volumes exceeded 2000 mm³. Statistical analysis of the mean tumor volume of the corresponding treatment groups versus the vehicle control group was done by ANOVA one way and Bonferroni parametric tests.

[0233] All mice were depilated before engraftment with VEET cream (Reckitt Benckiser AG, Wallisellen, Switzerland) on the right flank. Photographs and weight measurements of mice were performed on the day of engraftment and later once a week. For each animal, 5×10e6 human PBMC were mixed with 5×10e6 JIMT-1 breast carcinoma cells in a final volume of 0.2 ml PBS. Four different PBMC donors were included. The PBMC/JIMT-1 mixture was subcutaneously injected into the right flank of each NOD/SCID mouse. A control group with 5×10e6 JIMT-1 breast carcinoma cells in a final volume of 0.2 ml PBS without any human PBMC was included. For each group of ten JIMT-1/PBMC engrafted animals (one group per PBMC donor), five animals were intravenously treated with HER2/CD3-1 bispecific antibody at 0.05 mg/kg 3 hours after engraftment using a volume of 100.1. Treatment was repeated 3 times per week, every two days, during two weeks. Tumors were measured twice a week with a caliper in two perpendicular dimensions and tumor volumes were calculated according to the following formula: tumor volume=[(width2×length)/2].

### Example 1

### Determination of mutations that reduce or abrogate binding to Protein A in VH3 subclass

[0234] Methods to abrogate Protein A binding in immunoglobulin constant region are known (Lindhofer H. et al., (1995) J Immunol, 155(1): 219-225; U.S. Pat. No. 6,551,592; Jendeberg L. et al., (1997) J Immunol Methods, 201(1): 25-34; PCT Publication No: WO2010151792). To assess the use of Protein A abrogating methods in full-length homo-dimeric immunoglobulins, an anti-HER2 homo-dimeric immunoglobulin based on a mixed IGHG1-IGHG3 Fc format and the corresponding Fc 133 control fragment were prepared. The anti-HER2 homo-dimeric immunoglobulin was formatted similarly to a naturally occurring antibody and consisted of a FAB fragment with anti-HER2 specificity fused to a Fc 133 fragment (a Fc sequence originating from the naturally occurring human IGHG3 isotype wherein the hinge sequence was substituted for the entire hinge sequence from the naturally occurring human IGHG1 isotype, abbreviated Fc 133 with SEQ ID NO:1—wherein the numerals in the name correspond to the immunoglobulin gamma isotype subclass of each domain in the order of: hinge/CH2/CH3; the corresponding full-length anti-HER2 immunoglobulin being referred herein as anti-HER2 FAB-Fc 133; heavy chain with SEQ ID NO: 2 and light chain with SEQ ID NO: 3). Post transfection, the anti-HER2 FAB-Fc 133 homo-dimer and Fc 133 fragment were assayed for Protein A binding by gradient chromatography according to the protocol described in the Materials and Methods Section. As shown in FIG. 3 and FIG. 4A, the Fc 133 fragment did not bind the commercial MabSelect SuRe™ Protein A resin (GE Healthcare Europe GmbH) while the anti-HER2 FAB-Fc 133 homo-dimer was able to bind.

[0235] To assess the contribution of the FAB constant domains, the anti-HER2 homo-dimer described above was reformatted as an anti-HER2 scFv-Fc molecule wherein the scFv unit consisted of the parent immunoglobulin variable domains fused by a 15 amino-acid linker (abbreviated herein as anti-HER2 scFv-Fc 133; heavy chain with SEQ ID NO: 4). The resulting anti-HER2 scFv-Fc 133 homo-dimer was therefore identical to the parent anti-HER2 FAB-Fc 133 homo-dimeric immunoglobulin but lacked the CH1 and CK constant domains. As shown in FIG. 4B, the scFv-Fc 133 homo-dimer exhibited Protein A binding as observed with the parent anti-HER2 homo-dimeric immunoglobulin. This finding led to the conclusion that the variable domains of the anti-HER2 FAB fragment were responsible for hampering the efficacy of the methods abrogating Protein A binding in the Fc portion of homo-dimeric immunoglobulins. More importantly, it was concluded that Protein A binding within variable domains of homo-dimeric immunoglobulins will prevent the preparation of hetero-dimeric immunoglobulins based on Protein A differential purification techniques.

[0236] All five domains of Protein A are known to bind the variable heavy chain domains from the VH3 variable domain subclass (Jansson B et al., (1998) FEMS Immunol. Med. Microbiol., 20(1): 69-78), a feature which is known to hamper the preparation of VH3 based FAB fragments following papain digestion of whole antibody molecules, since Protein A binds both VH3 based FAB and Fc fragments. The heavy chain variable domain found in the homo-dimeric anti-HER2 immunoglobulin or its scFv-Fc version belongs to the VH3-23 subclass, and explains why these homo-dimeric molecules bound Protein A in spite of having no Protein A binding site within their engineered Fc regions.

[0237] VH3 based immunoglobulins or fragments thereof are of major importance to the biotechnology industry. VH3 based molecules have been extensively developed since their ability to bind Protein A facilitates their functional pre-screening, and as such many synthetic or donor based phage display libraries or transgenic animal technologies used for antibody discovery are based on the VH3 domain subclass. In addition VH3 based molecules are often selected for their good expression and stability over other known heavy chain variable domain subclasses. A recombinant version of Protein A which does not bind VH3 based FAB fragments has been developed and commercialized by GE Healthcare under the trade name MabSelect SuRe™.

[0238] Since the MabSelect SuRe™ resin was used herein for the Protein A binding assessment of the two homo-dimeric anti-HER2 immunoglobulins discussed above, it was concluded that the MabSelect SuRe™ resin was unsuitable for the preparation of hetero-dimeric immunoglobulins having at least one VH3 variable domain when using Protein A differential purification techniques—since homo-dimeric species having no Protein A binding in their Fc regions will still bind Protein A through their VH3 domains.

[0239] To investigate substitutions that would abrogate or reduce Protein A binding from VH3 based homo-dimeric immunoglobulins or fragments thereof, VH3 based FAB variants will need to be assayed for Protein A binding. Although the MabSelect SuRe™ resin type is known to lack VH3 domain subclass binding, another commercial Protein A resin known as MabSelect™ does bind the VH3 domain subclass (also from GE healthcare) and was selected to analyse VH3 based FAB variants for Protein A binding.

[0240] The use of the MabSelect™ resin was validated by preparing a recombinant anti-HER2 FAB fragment derived from the parent anti-HER2 homo-dimeric immunoglobulin described earlier that is known to be of the VH3-23 variable domain subclass (abbreviated herein as anti-HER2 FAB; heavy chain with SEQ ID NO: 5 and light chain with SEQ ID NO: 3), and assaying the fragment onto the MabSelect™ and MabSelect SuRe™ columns (having a light chain based on the VK subclass I, the FAB fragment was first purified in capture-elution mode using protein L chromatography before Protein A gradient chromatography was performed on MabSelect™ or MabSelect SuRe™ columns, protocol for both columns followed the protocol described the Materials and Methods section). As shown in FIG. 4C, the VH3 based anti-HER2 FAB only bound to the MabSelect™ column, confirming that the MabSelect SuRe™ resin lacks binding to the VH3 based FAB fragments; at least as far as monomeric VH3 based FAB fragments are concerned, and further contrasted with the results observed earlier for the VH3 based homo-dimeric immunoglobulins with engineered Fc regions having no binding to Protein A. Conversely, the anti-HER2 FAB showed strong binding to the MabSelect™ column which offered the possibility to assay for VH3 based FAB variants that would have no or reduced Protein A binding.

[0241] To abrogate Protein A binding in VH3 based FAB fragments, critical Protein A binding residues in VH3 domains were identified from the crystal structure of a human FAB fragment in complex with the D domain of Protein A (PDB code: 1DEE; www.pdb.org; Graille M et al., (2000) Proc Natl Acad Sci USA, 97(10): 5399-5404). This analysis was used as a starting point for rational design wherein the nature of the substitutions undertaken was based on sequence comparison between Protein A binding and non-Protein A binding VH subclasses from human origin. FIG. 5 shows an alignment of one representative framework for each human heavy chain variable domain subclass. Amino acid positions 15, 17, 19, 57, 59, 64, 65, 66, 68, 70, 81, 82a, and 82b (Kabat numbering) were identified as part of the protein-protein interaction interface between the D domain of Protein A and the VH3 based FAB fragment in the 1DEE structure. Amongst human VH subclasses, VH3 is the only subclass to bind Protein A, and residues at equivalent amino acid sequence positions in other subclasses were selected to be the source of the substitutions with the view to abrogate or reduce Protein A binding while having potentially reduce immunogenicity—since these substitutions involved the replacement of one residue with another naturally occurring residue at the same equivalent amino acid position found in a non-Protein A binding human VH subclass.

[0242] Mutations were introduced in the sequence of the aforementioned anti-HER2 FAB fragment by standard PCR based mutagenesis techniques, the following substitutions were made: G65S (heavy chain with SEQ ID NO:6 and light chain with SEQ ID NO: 3), R66Q (heavy chain with SEQ ID NO: 7 and light chain with SEQ ID NO: 3), T68V (heavy chain with SEQ ID NO: 8 and light chain with SEQ ID NO: 3), Q81E (heavy chain with SEQ ID NO: 9 and light chain with SEQ ID NO: 3), N82aS (heavy chain with SEQ ID NO: 10 and light chain with SEQ ID NO: 3), and the combination R19G/T57A/Y59A (heavy chain with SEQ ID NO: 11 and light chain with SEQ ID NO: 3).

[0243] In addition, the T57A substitution (heavy chain with SEQ ID NO: 12 and light chain with SEQ ID NO: 3), and T57E substitution (heavy chain with SEQ ID NO: 13 and light chain with SEQ ID NO: 3) were made. T57A was previously shown to abrogate Protein A binding in WO2010075548, and T57E was designed to introduce a charged residue that may disrupt the VH3-Protein A interaction. Having a light chain based on the VK subfamily I, FAB mutants were first purified in capture-elution mode using Protein L chromatography, and further assayed for Protein A binding using the MabSelect™ column operated under gradient mode as described in the Materials and Methods section. FIG. 6 shows that only T57A, T57E, G65S, Q81E, N82aS and the combination R19G/T57A/Y59A abrogated or reduced anti-HER2 FAB binding to the MAbSelect™ resin. Substitutions G65S, Q81E and N82aS are preferred when abrogating Protein A binding in VH3 based FAB fragments since these mutations substitute for the sequence equivalent residue found in non-Protein A binding VH subclasses thereby potentially reducing immunogenicity.

[0244] Antibody affinity and specificity is essentially confined to the CDR regions, however, framework substitutions may impact on antibody properties as shown in the case of several humanized antibodies. To assess if the above substitutions may impact the specificity and/or the affinity of VH3 derived antibodies, two of the preferred FAB mutants were assayed for HER2 antigen binding by Surface Plasmon Resonance (SPR). SPR measurements with recombinant HER2 antigen were performed as described in the Materials and Methods section. Both preferred mutants showed identical binding to the HER2 antigen when compared to the original FAB molecule (FIG. 7) demonstrating that the substitutions had not impact in terms of specificity or affinity. It is therefore expected that these substitutions could be broadly used to engineer out Protein A binding in VH3 derived antibody molecules without significant loss of antigen binding.

[0245] Two of these preferred substitutions were introduced in the anti-HER2 homo-dimeric immunoglobulin and anti-HER2 scFv-Fc molecule described earlier, and variants were assayed for binding onto the MabSelect SuRe™ resin. The following variants were prepared: anti-HER2 scFv(G65S)-Fc 133 (heavy chain with SEQ ID NO: 14), anti-HER2 scFv(N82aS)-Fc 133 (heavy chain with SEQ ID NO: 15), anti-HER2 FAB(G65S)-Fc 133 (heavy chain with SEQ ID NO: 16 and light chain with SEQ ID NO: 3), and anti-HER2 FAB(N82aS)-Fc 133 (heavy chain with SEQ ID NO: 17 and light chain with SEQ ID NO: 3).

[0246] FIG. 8 shows the profiles from the MabSelect SuRe™ chromatography for all four mutants. All variants now displayed reduced to almost no binding to the MabSelect SuRe™ column indicating a successful removal of Protein A binding with the previously identified substitutions. More importantly, it was concluded that when combined with Protein A differential purification techniques, substitutions which abrogate or reduce VH3 based FAB affinity for Protein A will allow the preparation of hetero-dimeric immunoglobulins wherein at least one VH3 variable domain is present.

### Example 2

### Antigen Binding Sites that Target the Human CD3 Antigen, Tumour Associated Antigens and Inflammatory Cell Surface Antigens

### Antigen Binding Sites Against the Human CD3 Antigen

[0247] The human CD3 epsilon subunit was selected to drive T cell redirect killing via bispecific engagement.

### Humanized Variants of the Mouse OKT3 Antibody

[0248] The anti-human CD3 epsilon antigen binding site used herein was derived from the mouse OKT3 antibody (Muromonab-CD3, trade name Orthoclone OKT3, marketed by Janssen-Cilag and subsequently discontinued; murine variable heavy chain and light chain domains with SEQ ID NO: 18 and 19, respectively). OKT3 murine variable domains were humanized and formatted as scFv and FAB fragments.

[0249] Humanization followed the method described by Jung S & Plückthun A (1997, Protein Eng, 10(8): 959-66) to produce a highly stable humanized variant that would be suitable for both FAB and scFv formatting. The method makes use of the highly stable pair of VH/VL domains found in the Herceptin® antibody (rhuMAbHER2, huMAB4D5-8, trastuzumab or trade name Herceptin®; U.S. Pat. No. 5,821,337; variable heavy chain and light chain domains with SEQ ID NO: 20 and 21, respectively) and follows the workflow of a humanization process onto fixed frameworks (Almagro J C & Fransson J (2008), Front Biosci, 13: 1619-33). Since the Herceptin® antibody is originally derived from the highly stable human families of germline framework VH3 and VK1, germline frameworks from these two families can be equally used as a source of fixed frameworks. Alternatively, the human VK3 germline light chain framework family can be used instead of VK1 as it also has good stability properties (Ewert S et al., (2003) J Mol Biol, 325: 531-553). In addition to mouse antibodies, human antibodies can be engineered using this fixed framework method to improve stability. Preferred is the use of the human germline framework IGHV3-23*04, IGKV1-39*01 and IGKV3-20*01 having SEQ ID NO: 22, 23 and 24, respectively (referenced according to IMGT® (the international ImMunoGeneTics information system (Lefranc M P et al. (1999) Nucleic Acids Res, 27(1): 209-12; Ruiz M et al. (2000) Nucleic Acids Res, 28(1): 219-21; Lefranc M P (2001) Nucleic Acids Res, 29(1): 207-9; Lefranc M P (2003) Nucleic Acids Res, 31(1): 307-10; Lefranc M P et al., (2005) Dev Comp Immunol, 29(3): 185-203; Kaas Q et al., (2007) Briefings in Functional Genomics & Proteomics, 6(4): 253-64; http://www.imgt.org).

[0250] To this aim a first humanized antibody was constructed wherein the CDRs in the variable domains of the Herceptin® antibody were respectively replaced with the CDRs from the mouse OKT3 antibody and benchmarked against a chimera of the mouse OKT3 antibody (variable heavy chain and light chain with SEQ ID NO: 25 and 26, and referred herein as the chimeric OKT3 antibody).

[0251] The prototype antibody (variable heavy chain and light chain with SEQ ID NO: 27 and 39, and abbreviated VH/VL) had increased production levels in transient expression tests and increased FAB stability as measured by differential scanning calorimetry but had no binding to HPB-ALL cells (assessed by median fluorescence intensity in FACS experiments, see Materials and Methods section), a human CD3 epsilon positive T cell tumour line (FIG. 9A).

[0252] Based on a 3D model of the first prototype pair of variable domains, a subset of back mutations (from CDR grafted Herceptin® prototype to mouse OKT3 sequence) were selected and tested: I34M, V48I, A49G, R58N, R58Y, I69L, A71T and T73K in the variable heavy chain domain and M4L, V33M, A34N, L46R, L47W, R66G, F71Y and P96F in the variable light chain (Kabat numbering). Note that the R58N substitution corresponds to a CDR grafted Herceptin® prototype-to-mouse OKT3 mutation while the R58Y substitution corresponds to a CDR grafted Herceptin® prototype-to-human IGHV3-23*04 germline substitution. The engineering strategy with regard to the combination of substitutions was based on the complementarity of the different substitutions in terms of their putative influence on CDR regions and/or variable domain packing and/or immunogenicity.

[0253] In a first approach, all candidates were formatted as human IgG1 antibodies. Best variants were selected according to expression levels, FAB fragment thermo-stability and ability to bind HPB-ALL cells by FACS. Best humanized variants had the Protein A binding site present within their VH domain abrogated using the G65S or N82aS substitution. This engineering step was needed to further produce safe T cell retargeting BEAT antibodies free of anti-CD3 homo-dimers.

[0254] Back mutations in the VH of: I34M, A49G and A71T along with back mutations in the VL of: M4L. L46R, L47W and F71Y restored affinity. Best combinations of variable domains were VH8/VL4, VH8/VL8, VH11/VL4 and VH11/L8 as these retained most of parental cell binding (FIG. 9A-C). In addition, combinations VH8/VL8 (variable domains with SEQ ID NO: 48 and 51, respectively) and VH1/VL8 (variable domains with SEQ ID NO: 49 and 51, respectively) had enhanced FAB stability and (+2.8° C. and +1.6° C., respectively, FIG. 9D).

[0255] Finally, best humanized variants were also reformatted as scFv-Fc fusions and transiently expressed. Variants were ranked in terms of their relative affinity, stability, expression levels in transient transfection in this format (FIG. 9E). Best combinations of variable domains in a scFv-Fc fusion format were similar to the combinations identified in an antibody format: VH8-VL4 (scFv fragment with SEQ ID NO: 58) and VH8-VL8 (scFv fragment with SEQ ID NO: 59). Both scFv fragments had good thermal stability with the scFv-Fc fusion format (FIG. 9F).

### Humanized Variants of the Mouse SP34 Antibody

[0256] The mouse antibody SP34 was first described in 1985 (Pessano S et al., (1985) EMBO J, 4(2):337-44). It was produced by a hybridoma obtained from mice immunised with denatured protein extracts from HPB-ALL cells, the antibody has human specificity and cross-reactivity to cynomolgus monkey. SP34 epitopes on human and cynomolgus monkey CD3 epsilon subunit are known.

[0257] Following the methods and work flow described in this example supra, humanized VH and VL domains for the murine SP34 antibody having a VH domain with SEQ ID NO: 60 and a VL domain with SEQ ID NO: 61 were engineered via CDR grafting onto the VH3-23 and VK3 germline frameworks, respectively. The resulting VH3 based variable domains can be further abrogated for Protein A binding using the G65S or N82aS substitutions (Kabat numbering) depending on their usage in a BEAT antibody format.

[0258] To this aim a first humanized antibody was constructed wherein the CDRs in the variable domains of a human antibody having a germline VH3 heavy chain domain and a germline VK3 light chain domain were respectively replaced with the CDRs from the mouse SP34 antibody. The resulting humanized antibody was used a starting point for further affinity improvement and benchmarked against a chimera of the SP34 antibody (heavy chain and light chain with SEQ ID NO: 62 and 63, respectively, and referred herein as the chimeric SP34 antibody).

[0259] The prototype antibody (variable heavy chain and light chain with SEQ ID NO: 64 and 69, and abbreviated VH1/VL1) had a low binding to human CD3 epsilon 1-26_Fc fusion protein (assessed by SPR, see Materials and Methods section and FIG. 10A).

[0260] Based on a 3D model of the first prototype pair of variable domains, a subset of substitutions that corresponded to either back mutations between the CDR grafted human germline VH3/VK3 prototype and mouse SP34 sequence (human-to-mouse or mouse-to-human substitutions) or rationally designed amino acid changes was selected. The following changes were made and tested in various combinations: W100eF, and W100eY in the variable heavy chain domain and A2I, S25A, T27A, G27aA, V27cA, T28A, T29A, S30A, N31A, Y32A, E38Q, F44P, G46L, T51A, N52A, K53A, R54A, P56A, L66G, D69T, F87Y, Q89A, W91F, Y92A, S93A, N94A, and Q100G in the variable light chain (Kabat numbering; see FIG. 10A). The engineering strategy with regard to the combination of substitutions was based on the complementarity of the different substitutions in terms of their putative influence on CDR regions and/or variable domain packing and/or immunogenicity and/or impact on transient expression in mammalian cells.

[0261] In a first approach, all candidates were formatted as human IgG1 antibodies and later further tested in a scFv-Fc fusion protein format (FIG. 10B) with some variants having the Protein A binding site present within their VH domain abrogated using the G65S. Best humanized candidates were selected according to expression levels and ability to bind the human and cynomolgus monkey CD3 epsilon 1-26_Fc fusion proteins by SPR.

[0262] Preferred combinations of heavy chain and light chain variable domains with regard to antigen binding and recombinant expression were as follows: VH1 (SEQ ID NO: 101) or VH2 (SEQ ID NO: 102) or VH3 (SEQ ID NO: 103) or VH5 (SEQ ID NO: 104) paired with light chains domains VL21 (SEQ ID NO: 105) and VL32 (SEQ ID NO: 106).

### HER2

[0263] Bispecific antibodies that would redirect T cells to kill HER2 positive cancer cells are useful to treat different forms of human breast cancer. Anti-HER2 antibodies have been described (Blumenthal G M et al., (2013) Clin Cancer Res, 19(18): 4911-6) with some being currently used in the clinic or currently under clinical investigations in humans (Tsang R Y & Finn R S (2012) Br J Cancer, 106(1): 6-13).

[0264] The anti-HER2 antigen binding site as used herein was derived from the recombinant humanized anti-HER2 antibody Herceptin® (see section 1.1) formatted as a FAB fragment (FAB heavy chain fragment with SEQ ID NO: 5 and light chain SEQ ID NO: 3) or a scFv fragment (SEQ ID NO: 107). In some formats, the Protein A binding present in the VH domain of the humanized anti-HER2 antibody 4D5 (VH3 domain subclass) was abrogated using the G65S substitution (FAB fragment with heavy chain having SEQ ID NO: 108 and light chain SEQ ID NO: 3 or scFv fragment with SEQ ID NO: 109) or the N82aS substitution (FAB fragment with heavy chain having SEQ ID NO: 110 and light chain SEQ ID NO: 3 or scFv fragment with SEQ ID NO: 111).

### CD38

[0265] CD38 is a type II transmembrane glycoprotein which is normally found on hemopoietic cells and in solid tissues. CD38 is also expressed in a variety of malignant hematological diseases. Bispecific antibodies that would redirect T cells to kill CD38 positive cancer cells will be useful to treat a variety of malignant hematological diseases, including multiple myeloma, B-cell chronic lymphocytic leukaemia, B-cell acute lymphocytic leukaemia, Waldenström's macroglobulinemia, primary systemic amyloidosis, mantle-cell lymphoma, pro-lymphocyticimyelocytic leukaemia, acute myeloid leukaemia, chronic myeloid leukaemia, follicular lymphoma, NK-cell leukaemia and plasma-cell leukaemia. Several anti-CD38 antibodies have been described as research reagents or therapeutic candidates (PCT Publication No: WO2006099875). Amongst the best characterized anti-human CD38 antibodies are OKT-10 and HB-7 mouse hybridomas (Hoshino S et al., (1997) J Immunol, 158(2): 741-7).

[0266] In a first approach, anti-human CD38 antigen binding sites can be derived from mouse hybridomas OKT10 (variable heavy chain and light chain with SEQ ID NO: 112 and 113, respectively) or HB-7 (variable heavy chain and light chain with SEQ ID NO: 114 and 115, respectively) and humanized versions thereof which can be further formatted as a FAB or scFv fragments. Following the methods and work flow described in Example 2.1, humanized VH and VL domains for the HB-7 hybridoma are can engineered via CDR grafting onto the VH3-23 and VK1 germline frameworks, respectively.

[0267] In a second approach, following the so-called best-fit humanization method described by Almagro J C & Fransson J (Front Biosci, (2008) 13: 1619-33), best-fit humanized VH and VL domains for the HB-7 hybridoma were engineered via CDR grafting onto the human IGHV4-59*03 and IGKV1-NL1*01 germline frameworks, respectively (referenced according to IMGT® supra). Humanized VH and VL variants with different degree of back mutations were investigated in silico and one preferred selection of humanized VH and VL was transiently expressed as a human IgG1 format and referred herein as humanized HB-7 best-fit VH (SEQ ID NO: 116) and VL (SEQ ID NO: 117) domains. The following mouse back mutations were introduced: (VH) S35H, I37V, I48L, V67L, V71K, T73N, F78V, Y91F and (VL): M4L, L48I, Y49S, T69K (Kabat numbering). The humanized HB-7 best-fit antibody (heavy chain with SEQ ID NO: 118 and light chain with SEQ ID NO: 119) stained CHO[CD38] recombinant cells by FACS (data not shown). The humanized HB-7 best-fit antibody had a binding affinity for the CD38 extracellular region similar to that of the chimeric HB-7 antibody (heavy chain with SEQ ID NO: 120 and light chain with SEQ ID NO: 121) when assayed by SPR (KDs of 3.6 and 2.5 nM, respectively; FIG. 11A (chimeric) and FIG. 11B (humanized)). Surprisingly, the humanized HB-7 best-fit antibody displayed a significant enhancement (+14.6° C.) in FAB fragment stability compared to the chimeric HB-7 antibody as judged from calorimetry profiles (76.4° C. (chimeric) vs 91.0° C. (humanized), FIG. 11F).

[0268] In a third approach, mice immunized with the human CD38 extracellular domain and human CD38+ cells were used to generate novel hybridoma candidates against human CD38. Methods to generate hybridomas are known and the methods used herein were similar to methods disclosed in PCT Publication No: WO2013008171. The 9G7 mouse antibody candidate had a high affinity for both human and cynomolgus monkey CD38 (variable heavy chain and light chain with SEQ ID NO: 122 and 123, respectively). This mouse antibody was first humanized according the methods described in this example supra. Using the best-fit approach, the germline VH framework IGHV2-5*09 and VK framework IGKV1-33*01 (referenced according to IMGT® supra) were selected as a starting point for the humanization process. Post CDR grafting, the first antibody prototype (formatted as a human IgG1 isoptype, heavy chain SEQ ID NO: 124 and light chain with SEQ ID NO: 125) exhibited a strong binding to human CD38 only three fold lower than the mouse parental antibody as judged by SPR (chimeric 9G7 antibody with heavy chain SEQ ID NO: 126 and light chain with SEQ ID NO: 127; KD of 0.3 nM and 1 nM for the chimeric 9G7 antibody (data not shown) and first humanized prototype (data not shown), respectively). Affinity improved by two fold upon introduction of the F36Y back mutation in the variable light chain of the antibody (Kabat numbering) (the resulting antibody is referred herein as the humanized 9G7 best-fit antibody with heavy chain SEQ ID NO: 124 and light chain with SEQ ID NO: 128; KD of 0.5 nM for human CD38, FIG. 11C). The humanized 9G7 best-fit antibody also exhibited a high affinity for the cynomolgus monkey CD38 antigen (KD of 3.2 nM, data not shown), and an enhanced FAB thermo-stability (FAB Tm from DSC scans) over the chimeric 9G7 antibody (94° C. vs. 82.2° C. for the humanized 9G7 best-fit antibody and the chimeric 9G7 antibody, respectively; see FIG. 11G). The humanized 9G7 best-fit antibody has heavy chain variable domain with SEQ ID NO: 129 and light chain variable domain with SEQ ID NO: 130.

[0269] In addition, the 9G7 mouse antibody was humanized following the best-framework approach via CDR grafting onto the VH3-23 and VK1 germline frameworks. Humanized V H and VL variants with different degree of back mutations were investigated in silico and one preferred selection of humanized VH and VL combination was transiently expressed as a human IgG1 antibody (the resulting antibody is referred herein as the humanized 9G7 best-framework antibody with heavy chain SEQ ID NO: 131 and light chain with SEQ ID NO: 132). The following mouse back mutations were introduced: (VH) A24F, V371, V48L, S49A, F67L, R71K, N73T, L78V, and K94R, and (VL) F36Y (Kabat numbering). This antibody exhibited a strong binding to human CD38 and cynomolgus monkey CD38 with affinity constants similar to that of the humanized 9G7 best-fit antibody (KD of 0.4 and 1 nM for human and cynomolgus monkey CD38, respectively; FIG. 11D). FAB thermo-stability (FAB Tm from DSC scans) was also very similar to that of the 9G7 best-fit F36Y humanized variant (89.2° C., see FIG. 11H). FIG. 11J summarizes the different humanized 9G7 antibodies described above. The humanized 9G7 best-framework antibody has heavy chain variable domain with SEQ ID NO: 133 and light chain variable domain with SEQ ID NO: 134.

[0270] In a fourth approach, an antibody phage library was screened to generate additional scFv fragments against human CD38. The library had a diversity based on the naturally occurring human V genes. This donor derived antibody phage display library used cDNAs amplified from blood lymphocytes originating from 48 human donors of which 70% had an autoimmune disease (vasculitis, systemic lupus erythematosus, spondiloarthropathy, rheumatoid arthritis and scleroderma). Library construction followed the protocol described by Schofield et al. (2007, Genome Biol., 8(11): R254) with a total diversity of 2.53×10e10 clones. ScFv fragments recognizing human and/or cynomolgus monkey CD38 were isolated from this donor derived phage display library as follows. ScFv fragments were isolated in a series of repeated selection cycles on recombinantly derived human and/or cynomolgus monkey CD38 antigens (see Materials and Methods section). Methods to screen antibody phage display libraries are known (Viti F et al., (2000) Methods Enzymol, 326: 480-505). Briefly, following incubation with the library, the immobilised antigen which had been previously coated on a plastic immunotube (overnight in PBS at a concentration of 20 μg/ml) or captured on streptavidin beads (when using a biotin labelled form of the antigen, antigen captured at a concentration of 50 nM throughout the selection process), bound phages were recovered whist unbound phages were washed away. Bound phages were rescued as described by Marks et al (Marks J D et al., (1991) J Mol Biol, 222(3): 581-97) and the selection process repeated three times. Over one thousand clones from the second and third round of panning were expressed and analysed by ELISA against the human and cynomolgus monkey CD38 antigens. Positive clones were subjected to DNA sequencing and some of the unique clones were further analysed for their ability to bind cell lines expressing human CD38. Following a first round of panning on a biotin labelled version of the human CD38 antigen immobilized on streptavidin beads and a second round of panning on a biotin labelled version of the cynomolgus monkey CD38 antigen immobilized on streptavidin beads, one preferred scFv fragment (clone No 767) having a variable heavy chain sequence with SEQ ID NO: 135 and a variable light chain with SEQ ID NO: 136 was selected for its ability to bind both human and cynomolgus monkey CD38. When formatted as a human IgG1 antibody, clone 767 had a KD of about 300 nM for human CD38 (FIG. 11E) and about 1.2 M for cynomolgus monkey CD38 (data not shown) (clone 767 IgG1 antibody is referred herein as human 767 antibody with heavy chain SEQ ID NO: 137 and light chain with SEQ ID NO: 138). FAB thermo-stability (FAB Tm from DSC scans) was 70.2° C. (FIG. 11I). Clone 767 VH domain belongs to the VH3 domain subclass.

### OX40

[0271] A bispecific antibody targeting CD3 and OX40 will allow targeting and depletion of activated T lymphocytes. In this combination, the activated T lymphocytes, which express both CD3 and OX40 molecules, will engage into a mutual killing process resulting in rapid cell disappearance. Co-engagement of human CD3 and OX40 by a bispecific antibody may achieve an effective elimination of pathogenic T cells in a short time frame. OX40 is a member of the TNFR-superfamily of receptors and was first identified in 1987 as a 50 kDa glycoprotein expressed on activated CD4+T cells from the rat (Paterson D J et al., (1987) Mol. Immunol. 24: 1281-90). Unlike CD28, OX40 is not constitutively expressed on naïve T cells but is induced after engagement of the T-Cell Receptor (TCR). OX40 is a secondary costimulatory molecule, expressed after 24 to 72 hours following activation; its ligand, OX40L, is also not expressed on resting antigen presenting cells, but is expressed following their activation.

[0272] The mouse anti-human OX40 antibody disclosed in PCT Publication No: WO2013008171 (heavy chain and light chain domains with SEQ ID NO: 139 and 140, respectively) can be used as a source of anti-human OX40 antigen binding site. A humanized version of this antibody based on the best-fit humanization method is also disclosed in PCT Publication No: WO2013008171 (heavy chain and light chain domains with SEQ ID NO: 141 and 142, respectively and with both antibodies being amendable for reformatting into a BEAT format.

[0273] Following the methods and work flow described in Example 2.1, humanized VH and VL domains for the anti-human OX40 hybridoma are engineered via CDR grafting onto the VH3-23 and VK1 germline frameworks, respectively. The resulting VH3 based variable domains are further abrogated for Protein A binding using the G65S or N82aS substitutions (Kabat numbering) depending on their usage in a BEAT antibody format. Only two humanized VH and VL domains were investigated differing by their different degree of back mutations. Back mutations were identified from sequence alignments between the parent antibody variable domains and a CDR grafted VH3 and VK1 similar to the first prototype antibody and the approach described in Example 2.1. These CDR grafted variable domains have no back mutations and are referred to herein as mingrafts. These sequences were then further modified to include all the back mutations identified from the previous alignment and resulted in modified variable domain sequences referred to herein as maxgrafts. The resulting sequences are summarized below:

[0274] Humanized and stabilized anti-OX40 VH having no back mutations; abbreviated humanized anti-OX40/mingraft VH (SEQ ID NO: 278).

[0275] Humanized and stabilized anti-OX40 VH having all possible back mutations; abbreviated humanized anti-OX40/maxgraft VH (SEQ ID NO: 279).

[0276] Humanized and stabilized anti-OX40 VL having no back mutations; abbreviated humanized anti-OX40/mingraft VL (SEQ ID NO: 280).

[0277] Humanized and stabilized anti-OX40 VL having all possible back mutations; abbreviated humanized anti-OX40/maxgraft VL (SEQ ID NO: 281).

### CD20

[0278] Bispecific antibodies that would redirect T cells to kill CD20 expressing B cells can be useful to treat different forms of human lymphomas cancers. Several anti-human CD20 antibodies have been described as research reagents or therapeutic candidates. Amongst the best characterized anti-human CD20 antibodies are the chimeric rituximab antibody and humanized variants thereof (chimeric rituximab antibody, trade name Rituxan®, PCT Publication No: WO1994011026; mouse VH domain of SEQ ID NO: 143 and VL domain of SEQ ID NO: 144).

[0279] Following the methods and work flow described in Example 2.1, humanized VH and VL domains for the rituximab chimeric antibody are engineered via CDR grafting onto the VH3-23 and VK1 germline frameworks, respectively. The resulting VH3 based variable domains are further abrogated for Protein A binding using the G65S or N82aS substitutions (Kabat numbering) depending on their usage in a BEAT antibody format. Two humanized VH and VL domains are investigated differing by their different degree of back mutations. Back mutations were identified from sequence alignments between the parent antibody variable domains and a CDR grafted VH3 and VK1 similar to the first prototype antibody and the approach described in Example 2.1. These CDR grafted variable domains have no back mutations and are referred to herein as mingrafts. These sequences were then further modified to include all the back mutations identified from the previous alignment and resulted in modified variable domain sequences referred to herein as maxgrafts. The resulting sequences are summarized below:

[0280] Humanized and stabilized Rituximab VH having no back mutations; abbreviated humanized Rituximab/mingraft VH (SEQ ID NO: 282).

[0281] Humanized and stabilized Rituximab VH having all possible back mutations; abbreviated humanized Rituximab/maxgraft VH (SEQ ID NO: 283).

[0282] Humanized and stabilized Rituximab VL having no back mutations; abbreviated humanized Rituximab/mingraft VL (SEQ ID NO:284).

[0283] Humanized and stabilized Rituximab VL having all possible back mutations; abbreviated humanized Rituximab/maxgraft VL (SEQ ID NO: 285).

### EGFR

[0284] Bispecific antibodies that would redirect T cells to kill EGFR positive cancer cells can be useful to treat different forms of human cancers, preferably human pancreatic cancers and human colon cancers. Several anti-human EGFR antibodies have been described as research reagents or therapeutic candidates. Amongst the best characterized anti-human EGFR antibodies are the chimeric cetuximab antibody and humanized variants thereof. (chimeric cetuximab antibody, trade name Erbitux®, C225, IMC-C225; PCT Publication No: WO199640210; mouse VH domain with SEQ ID NO: 145 and mouse VL domain with SEQ ID NO: 146).

[0285] Following the methods and work flow described in Example 2.1, humanized VH and VL domains for the Erbitux® chimeric antibody are engineered via CDR grafting onto the VH3-23 and VK1 germline frameworks, respectively. The resulting VH3 based variable domains are further abrogated for Protein A binding using the G65S or N82aS substitutions (Kabat numbering) depending on their usage in a BEAT antibody format. Two humanized VH and VL domains are investigated differing by their different degree of back mutations. Back mutations were identified from sequence alignments between the parent antibody variable domains and a CDR grafted VH3 and VK1 similar to the first prototype antibody and the approach described in Example 2.1. These CDR grafted variable domains have no back mutations and are referred to herein as mingrafts. These sequences were then further modified to include all the back mutations identified from the previous alignment and resulted in modified variable domain sequences referred to herein as maxgrafts. The resulting sequences are summarized below:

[0286] Humanized and stabilized Erbitux VH having no back mutations; abbreviated humanized Erbitux/mingraft VH (SEQ ID NO: 286).

[0287] Humanized and stabilized Erbitux VH having all possible back mutations; abbreviated humanized Erbitux/maxgraft VH (SEQ ID NO: 287).

[0288] Humanized and stabilized Erbitux VL having no back mutations; abbreviated humanized Erbitux/mingraft VL (SEQ ID NO: 288).

[0289] Humanized and stabilized Erbitux VL having all possible back mutations; abbreviated humanized Erbitux/maxgraft VL (SEQ ID NO: 289).

[0290] Another well characterized anti-human EGFR antibody is the human panitumumab antibody and humanized variants thereof (human panitumumab antibody, trade name Vectibix®, PCT Publication No: WO2012138997; mouse VH domain with SEQ ID NO: 290 and mouse VL domain with SEQ ID NO: 291).

[0291] Following the methods and work flow described in Example 2.1, humanized VH and VL domains for the Vectibix® chimeric antibody are engineered via CDR grafting onto the VH3-23 and VK1 germline frameworks, respectively. The resulting VH3 based variable domains are further abrogated for Protein A binding using the G65S or N82aS substitutions (Kabat numbering) depending on their usage in a BEAT antibody format. Two humanized VH and VL domains are investigated differing by their different degree of back mutations. Back mutations were identified from sequence alignments between the parent antibody variable domains and a CDR grafted VH3 and VK1 similar to the first prototype antibody and the approach described in Example 2.1. These CDR grafted variable domains have no back mutations and are referred to herein as mingrafts. These sequences were then further modified to include all the back mutations identified from the previous alignment and resulted in modified variable domain sequences referred to herein as maxgrafts. The resulting sequences are summarized below:

[0292] Humanized and stabilized Vectibix VH having no back mutations; abbreviated humanized Vectibix/mingraft VH (SEQ ID NO: 292).

[0293] Humanized and stabilized Vectibix VH having all possible back mutations; abbreviated humanized Vectibix/maxgraft VH (SEQ ID NO: 293).

[0294] Humanized and stabilized Vectibix VL having no back mutations; abbreviated humanized Vectibix/mingraft VL (SEQ ID NO: 294).

[0295] Humanized and stabilized Vectibix VL having all possible back mutations; abbreviated humanized Vectibix/maxgraft VL (SEQ ID NO: 295).

### CD19

[0296] Bispecific antibodies that would redirect T cells to kill CD19 expressing B cells will be useful to treat different forms of human blood and myeloid cancers. The human CD19 molecule is a structurally distinct cell surface receptor expressed on the surface of human B cells, including, but not limited to, pre-B cells, B cells in early development (i.e., immature B cells), mature B cells through terminal differentiation into plasma cells and malignant B cells. CD19 is expressed by most pre-B acute lymphoblastic leukemias (ALL), non-Hodgkin's lymphomas, B cell chronic lymphocytic leukemias (CLL), pro-lymphocytic leukemias, hairy cell leukemias, common acute lymphocytic leukemias and some Null-acute lymphoblastic leukemias (Nadler L M et al. (1983) J Immunol, 131: 244-250; Anderson K C et al., (1984) Blood, 63: 1424-1433; Loken M R et al. (1987) Blood, 70: 1316-1324; Uckun F M et al. (1988) Blood, 71: 13-29; Scheuermann R H & Racila E (1995) Leuk Lymphoma, 18: 385-397). The expression of CD19 on plasma cells further suggests it may be expressed on differentiated B cell tumors such as multiple myeloma, plasmacytomas, Waldenstrom's tumors (Grossbard M L et al. (1998) Br J Haematol, 102: 509-15; Treon S P et al. (2003) Semin Oncol, 30: 248-52).

[0297] Humanized anti-human CD19 antibodies described in PCT Publication No: WO2010/095031 utilise the VH3-23 and VK1 variable domain frameworks and can be used to produce bispecific antibodies as described in Example 2.1. The humanized anti-human CD19 antibody having a VH domain with SEQ ID NO: 296 and a VL domain with SEQ ID NO: 297 is used and further abrogated for Protein A binding using the G65S or N82aS substitutions (Kabat numbering) depending on its use in a BEAT antibody format.

### IgE

[0298] Bispecific antibodies that would redirect T cells to kill membrane bound IgE positive B cells can be useful to treat different inflammatory disease such as asthma or fibrosis. Several anti-human IgE antibodies have been described as research reagents or therapeutic candidates. Amongst the best characterized anti-human IgE antibodies are the Omalizumab antibody (trade name Xolair®, USPTO publication No: U.S. Pat. No. 6,761,889, U.S. Pat. No. 6,329,509 and US20080003218A1; Presta L G et al., (1993) J Immunol, 151: 2623-2632; humanized VH domain with SEQ ID NO: 298 and VL domain with SEQ ID NO: 299) and variants thereof.

[0299] Following the methods and work flow described in Example 2.1, humanized VH and VL domains for the Omalizumab antibody are engineered via CDR grafting onto the VH3-23 and VK1 germline frameworks, respectively. The resulting VH3 based variable domains are further abrogated for Protein A binding using the G65S or N82aS substitutions (Kabat numbering) depending on their usage in a BEAT antibody format. Two stabilized VH and VL domains are investigated differing by their different degree of back mutations. Back mutations were identified from sequence alignments between the parent antibody variable domains and a CDR grafted VH3 and VK1 similar to the first prototype antibody and the approach described in Example 2.1. These CDR grafted variable domains have no back mutations and are referred to herein as mingrafts. These sequences were then further modified to include all the back mutations identified from the previous alignment and resulted in modified variable domain sequences referred to herein as maxgrafts. The resulting sequences are summarized below:

[0300] Stabilized Omalizumab VH having no back mutations; abbreviated stabilized Omalizumab/mingraft VH (SEQ ID NO: 300).

[0301] Stabilized Omalizumab VH having all possible back mutations; abbreviated stabilized Omalizumab/maxgraft VH (SEQ ID NO: 301).

[0302] Stabilized Omalizumab VL having no back mutations; abbreviated stabilized Omalizumab/mingraft VL (SEQ ID NO: 302).

[0303] Stabilized Omalizumab VL having all possible back mutations; abbreviated stabilized Omalizumab/maxgraft VL (SEQ ID NO: 303).

[0304] Another example of anti-human IgE antibody is the mouse antibody Bsw17 (Vogel M et al., (2004) J Mol Biol, 341(2): 477-89; mouse VH domain with SEQ ID NO: 304 and mouse VL domain with SEQ ID NO: 305).

[0305] Following the methods and work flow described in Example 2.1, humanized VH and VL domains for the humanized Bsw17 antibody are engineered via CDR grafting onto the VH3-23 and VK1 germline frameworks, respectively. The resulting VH3 based variable domains are further abrogated for Protein A binding using the G65S or N82aS substitutions (Kabat numbering) depending on their usage in a BEAT antibody format. Two stabilized VH and VL domains are investigated differing by their different degree of back mutations. Back mutations were identified from sequence alignments between the parent antibody variable domains and a CDR grafted VH3 and VK1 similar to the first prototype antibody and the approach described in Example 2.1. These CDR grafted variable domains have no back mutations and are referred to herein as mingrafts. These sequences were then further modified to include all the back mutations identified from the previous alignment and resulted in modified variable domain sequences referred to herein as maxgrafts. The resulting sequences are summarized below:

[0306] Stabilized Bsw17 VH having no back mutations; abbreviated stabilized Bsw17/mingraft VH (SEQ ID NO: 306).

[0307] Stabilized Bsw17 VH having all possible back mutations; abbreviated stabilized Bsw17/maxgraft VH (SEQ ID NO: 307).

[0308] Stabilized Bsw17 VL having no back mutations; abbreviated stabilized Bsw17/mingraft VL (SEQ ID NO: 308).

[0309] Stabilized Bsw17 VL having all possible back mutations; abbreviated stabilized Bsw17/maxgraft VL (SEQ ID NO: 309).

### Example 3

### Production of T Cell Retargeting Hetero-Dimeric Immunoglobulins 3.1 BEATS Technology and Built-in Purification System

[0310] BEAT antibodies are heavy chain hetero-dimers based on a unique concept of bio-mimicry that exhibit superior hetero-dimerization over the “knob-into-hole” technology (PCT publication No: WO2012131555). The BEAT platform is based on an exchange of interface amino acids at 3D equivalent positions between naturally occurring homo or hetero-dimeric immunoglobulin domain pairs to create new hetero-dimers that can be used as building blocks for Fc-based bispecific antibodies. The technology allows for the design of Fc-based bispecific antibodies using any type of antigen binding scaffold. A scFv-FAB format is used herein to design Fc-based bispecific antibodies without the need to develop a common light chain for both antigen binding sites.

[0311] Since BEAT antibodies are heavy chain hetero-dimers, it is needed to distinguish between the two different heavy chains. These are referred herein as BTA and BTB chains. BTA and BTB chains as used herein encompass an antigen binding site, a human IgG1 hinge region, a CH2 domain originating from human IgG1 or IgG3 isotype and a modified CH3 domain originating from human IgG1 or IgG3 isotype. Some of the BTA and BTB CH3 domains were identical or modified variants of the domains described in PCT Publication No: WO2012131555. BTA and BTB CH3 domains were selected from the groups consisting of: (BTA) SEQ ID NO: 147, 148, 149, 153, 154, and 155, and (BTB) SEQ ID NO: 150, 151, 152, 156, 157, and 158. Preferred BTA-BTB CH3 domain pairings are selected from the group consisting of: SEQ ID NO: 147 with SEQ ID NO: 150, SEQ ID NO: 148 with SEQ ID NO: 150, SEQ ID NO: 149 with SEQ ID NO: 151, SEQ ID NO: 147 with SEQ ID NO: 152, and SEQ ID NO: 148 with SEQ ID NO: 152. Most preferred BTA-BTB CH3 domain pairings are selected from the group consisting of: SEQ ID NO: 147 with SEQ ID NO: 156, SEQ ID NO: 148 with SEQ ID NO: 156, SEQ ID NO: 154 with SEQ ID NO: 150, and SEQ ID NO: 154 with SEQ ID NO: 152.

[0312] As described above, BEAT heavy chain hetero-dimers with an asymmetrical binding to Protein A can be created using parental domains from immunoglobulin isotypes having no binding to Protein A (PCT publication No: WO2012131555). A difference in the number of Protein A binding sites between homo- and hetero-dimeric species is particularly useful to resolve these molecular species by Protein A chromatography. To avoid a residual binding that will interfere with species separation by Protein A chromatography, it is necessary to abrogate any secondary Protein A binding sites which are naturally found within the VH3 subclass of human heavy chain variable domains. When antigen binding sites originate from the VH3 family, abrogation of their Protein A binding site can be achieved through the G65S or N82aS substitutions (Kabat numbering).

[0313] When preparing a bispecific antibody encompassed by the present invention, using one antigen binding site of VH3 origin and one antigen binding site from a non VH3 origin, the antigen binding site of VH3 origin needs to be located on the heavy chain that does bind Protein A in its Fc region. Alternatively, the antigen binding site of VH3 origin can be substituted with the N82aS substitution or G65S substitution or equivalent substitutions thereof to abrogate Protein A binding. When preparing a bispecific antibody from the present invention using a pair of antigen binding sites of VH3 origin, the only possibility is to abrogate Protein A binding in at least one of the VH3 based antigen binding sites through the amino acid substitutions described above. Preferably, bispecific antibodies from the present invention are engineered to create one of the two homo-dimer without Protein A binding site. More preferably, bispecific antibodies from the present invention are engineered to create one homo-dimer without Protein A binding site, and the other homo-dimer having a substantial difference in its number of Protein A binding sites (at least one Protein A binding site, preferably two Protein A binding sites) over the hetero-dimer of interest.

[0314] Mechanisms of toxicity triggered by monospecific anti-human CD3 epsilon antibodies have been under extensive investigation; direct mechanisms have been linked to affinity, epitope and valency of the antibodies but indirect mechanisms of toxicity have also been described. These indirect mechanisms of toxicity are mediated by the Fc region of the anti-human CD3 epsilon antibodies which interact with Fc receptor expressing immune cells and lead to transient T cell activation and cytokine release. With a goal to improve safety, BEAT antibodies targeting human CD3 epsilon were abrogated for Fc-receptor binding in their lower hinge region. Fc receptor binding was abrogated or reduced using the L234A and L235A substitutions (EU numbering; Strohl W R et al., (2009) Curr Opin Biotechnol, 20(6): 685-91); which are often referred as the LALA substitutions.

### Examples of BEAT Antibodies Encompassing at Least One VH3 Domain Abrogated for Protein A Binding

### Examples of HER2/CD3 Targeting BEAT Antibodies

[0315] Anti-HER2 and anti-CD3 epsilon arms can be formatted either as a scFv-Fc type of heavy chains consisting of a scFv fragment fused to a BEAT chain or as a heavy chain consisting of a FAB fragment fused to a BEAT chain similar to that of a naturally occurring antibody. The FAB based heavy chain requires its association with its cognate light chain to assemble into a functional antigen binding site. L234A and L235A substitutions were introduced in CH2 regions and residual Protein A binding was abrogated within using the G65S or N82aS substitutions (Kabat numbering) when appropriate. Examples of BEAT antibodies targeting both human HER2 antigen and human CD3 epsilon were formatted as follows:

[0316] A first BEAT HER2/CD3 antibody was engineered using a combination of antigen binding sites described in Example 2.1 and 2.2 for the anti-human CD3 epsilon and the anti-human HER2 arms, respectively. The anti-human CD3 epsilon arm of the hetero-dimeric immunoglobulin consisted of a BEAT heavy chain (SEQ ID NO: 159) encompassing a variable heavy chain region with the N82aS substitution (Kabat numbering), a CH1 γ1 region, a γ1 hinge region, a γ3 CH2 region with L234A and L235A substitutions (EU numbering), and a γ3 based BEAT CH3 domain assembled with its cognate light chain (SEQ ID NO: 47). This heavy chain encompassed part of a human IgG3 Fc region and therefore had no binding to Protein A but since the heavy chain used herein had its heavy chain variable domain originating from the VH3 domain subclass, the VH domain was mutated to include the N82aS substitution thereby removing any additional Protein A binding sites within the heavy chain. The anti-human HER2 arm of the hetero-dimeric immunoglobulin consisted of a BEAT heavy chain (SEQ ID NO: 160) encompassing a scFv fragment, a CH1 γ1 region, a γ1 hinge region, a γ1 CH2 region with L234A and L235A substitutions (EU numbering), and a γ1 based BEAT CH3 domain. This bispecific antibody is referred herein as BEAT HER2/CD3-1 antibody (FIG. 12A format A).

[0317] A second BEAT HER2/CD3 antibody was engineered using a combination of antigen binding sites described in Example 2.1 and 2.2 for the anti-human CD3 epsilon and the anti-human HER2 arms, respectively. The anti-human HER2 arm of the hetero-dimeric immunoglobulin consisted of a BEAT heavy chain (SEQ ID NO: 161) encompassing a variable heavy chain region, a CH1 γ1 region, a γ1 hinge region, a γ1 CH2 region with L234A and L235A substitutions (EU numbering), and a γ1 based BEAT CH3 domain assembled with its cognate light chain (SEQ ID NO: 3). The anti-human CD3 epsilon arm of the hetero-dimeric immunoglobulin consisted of a BEAT heavy chain (SEQ ID NO: 162) encompassing a scFv fragment, a CH1 γ1 region, a γ1 hinge region, a γ3 CH2 region with L234A and L235A substitutions (EU numbering), and a γ3 based BEAT CH3 domain. This heavy chain encompassed part of a human IgG3 Fc region and therefore had no binding to Protein A but since the heavy chain used herein had its heavy chain variable domain originating from the VH3 domain subclass, the VH domain was mutated to include the N82aS substitution thereby removing any additional Protein A binding sites within the heavy chain. This bispecific antibody is referred herein as BEAT HER2/CD3-2 antibody (FIG. 12A format B).

[0318] A third BEAT HER2/CD3 antibody was engineered using a combination of antigen binding sites described in Example 2.1 and 2.2 for the anti-human CD3 epsilon and the anti-human HER2 arms, respectively. The anti-human CD3 epsilon arm of the hetero-dimeric immunoglobulin consisted of a BEAT heavy chain (SEQ ID NO: 163) encompassing a variable heavy chain domain with the G65S substitution (Kabat numbering), a CH1 γ1 region, a γ1 hinge region, a γ3 CH2 region with L234A and L235A substitutions (EU numbering), and a γ3 based BEAT CH3 domain assembled with its cognate light chain (SEQ ID NO: 47). This heavy chain encompassed part of a human IgG3 Fc region and therefore had no binding to Protein A but since the heavy chain used herein had its heavy chain variable domain originating from the VH3 domain subclass, the VH domain was mutated to include the G65S substitution thereby removing any additional Protein A binding sites within the heavy chain. The anti-human HER2 arm of the hetero-dimeric immunoglobulin consisted of a BEAT heavy chain (SEQ ID NO: 164) encompassing a scFv fragment, a CH1 γ1 region, a γ1 hinge region, a γ1 CH2 region with L234A and L235A substitutions (EU numbering), and a γ1 based BEAT CH3 domain. The scFv portion of the bispecific antibody was further stabilised using an engineered disulfide bond between the heavy and light chain domains at Kabat position heavy chain 44 (G44C) and light chain 100 (Q100C) as described in PCT publication No WO 1994029350. This bispecific antibody is referred herein as BEAT HER2/CD3-3 antibody (FIG. 12B format C).

[0319] A fourth BEAT HER2/CD3 antibody was engineered using a combination of antigen binding sites described in Example 2.1 and 2.2 for the anti-human CD3 epsilon and the anti-human HER2 arms, respectively. The anti-human CD3 epsilon arm of the hetero-dimeric immunoglobulin consisted of a BEAT heavy chain (SEQ ID NO: 165) encompassing a variable heavy chain domain, a CH1 γ1 region, a γ1 hinge region, a γ1 CH2 region with L234A and L235A substitutions (EU numbering), and a γ1 based BEAT CH3 domain assembled with its cognate light chain (SEQ ID NO: 166). This heavy chain and light assembly encompassed a humanized version of the anti-human CD3 epsilon antibody (SP34) as described in PCT Publication No: WO2008119565. The anti-human HER2 arm of the hetero-dimeric immunoglobulin consisted of a BEAT heavy chain (SEQ ID NO: 167) encompassing a scFv fragment, a CH1 γ1 region, a γ1 hinge region, a γ3 CH2 region with L234A and L235A substitutions (EU numbering), and a γ3 based BEAT CH3 domain. This heavy chain encompassed part of a human IgG3 Fc region and therefore had no binding to Protein A but since the heavy chain used herein had its heavy chain variable domain originating from the VH3 domain subclass, the VH domain was mutated to include the N82aS substitution thereby removing any additional Protein A binding sites within the heavy chain. This bispecific antibody is referred herein as BEAT HER2/CD3(SP34) antibody (FIG. 12B format D).

[0320] A fifth BEAT HER2/CD3 antibody was engineered using a combination of antigen binding sites described in Example 2.1 and 2.2 for the anti-human CD3 epsilon and the anti-human HER2 arms, respectively. The anti-human CD3 epsilon arm of the hetero-dimeric immunoglobulin consisted of a BEAT heavy chain (SEQ ID NO: 168) encompassing a variable heavy chain domain, a CH1 γ1 region, a γ1 hinge region, a γ1 CH2 region with L234A and L235A substitutions (EU numbering), and a γ1 based BEAT CH3 domain assembled with its cognate light chain (SEQ ID NO: 89). This arm of the bispecific antibody encompassed the variable domains of the humanized SP34 VH1/VL21 antibody described in Example 2.1. The anti-human HER2 arm of the hetero-dimeric immunoglobulin consisted of a BEAT heavy chain (SEQ ID NO: 167) encompassing a scFv fragment, a CH1 γ1 region, a γ1 hinge region, a γ3 CH2 region with L234A and L235A substitutions (EU numbering), and a γ3 based BEAT CH3 domain. This arm is equivalent to the BEAT HER2/CD3(SP34) anti-HER2 arm described above (see FIG. 12B format D). The heavy chain encompassed part of a human IgG3 Fc region and therefore had no binding to Protein A but since the heavy chain used herein had its heavy chain variable domain originating from the VH3 domain subclass, the VH domain was mutated to include the N82aS substitution thereby removing any additional Protein A binding sites within the heavy chain. This bispecific antibody is referred herein as BEAT HER2/CD3(SP34-Kappa1) antibody (FIG. 12C format E).

[0321] BEAT HER2/CD3-1, BEAT HER2/CD3-2, BEAT HER2/CD3-3, BEAT HER2/CD3(SP34), and BEAT HER2/CD3(SP34-Kappa1) antibodies were expressed transiently, purified and tested in vitro for their affinity towards the HER2 and CD3 epsilon antigens, their stability and their ability to redirect T cell killing. Transient expression yields were in the range of 5-15 mg/l of culture supernatant for all BEAT antibodies. Importantly, all bispecific antibodies exhibited very low level of homo-dimeric contaminants in their preparation after a single Protein A chromatography step. Since all these BEAT antibodies were designed with both arm encompassing a VH3 domain, only abrogation of Protein A binding in at least one VH3 domain allowed to readily purify the hetero-dimer of interest using the one of the preferred differential purification method (see FIG. 2E). An example of differential Protein A purification trace for the BEAT HER2/CD3-1 antibody is shown in FIG. 13, and FIG. 14 shows the capillary electrophoresis profile of the purified hetero-dimer. Only a marginal content of homo-dimeric contaminants can be identified from this profile. Homo-dimers of the heavy chain formatted to carry a FAB portion are not found since these do not bind Protein A. Homo-dimers of the heavy chain formatted to carry the scFv fragments are found in a marginal proportion (2.5%), resulting in a hetero-dimer content of 97% after a single Protein A chromatography step. BEAT HER2/CD3-2, BEAT HER2/CD3-3, BEAT HER2/CD3(SP34), and BEAT HER2/CD3(SP34-Kappa1) antibodies purified to similar levels of homogeneity and purity after a single Protein A chromatography step. The BEAT HER2/CD3-3 antibodies showed a proportion of disulfide bonded hetero-dimer aggregates after Protein A chromatography (27%) that were removed by cation exchange chromatography.

[0322] To further demonstrate that abrogation of Protein A binding within VH3 based heavy chain hetero-dimers greatly impacts on post Protein A chromatography purity, a BEAT HER2/CD3-1 antibody was engineered without the aforementioned N82aS substitution. FIGS. 15A and 15B show the SDS-PAGE analysis of eluted Protein A chromatography fractions for the BEAT HER2/CD3-1 and its non N82aS substituted version, respectively. At pH 4, the eluted fraction for the non N82aS substituted version exhibits an additional band corresponding to homo-dimers of the heavy chain formatted to carry a FAB arm (FIG. 15B) while the N82aS substituted BEAT HER2/CD3 version does not (FIG. 15A), since the heavy chain formatted to carry a FAB arm has no binding to Protein A in its Fc region (Fc region based on human IgG3 isotype), it can only be deduced that the VH3 based variable domains found in this homo-dimeric species are responsible for Protein A binding. This result clearly demonstrates the utility of abrogating Protein A binding within VH3 based heavy chain hetero-dimers.

[0323] Both BEAT HER2/CD3-1 and BEAT HER2/CD3-2 antibodies had similar KD values for the human HER2 and human CD3 epsilon antigens. KD values were in the range of 0.50-2 nM for the human HER2 antigen and 1-2 μM for the human CD3 epsilon antigen (measured by SPR using the human CD3gamma-epsilon-Fc construct (see Materials and Methods section; FIGS. 16A and 16B). DSC profiles for the two bispecific antibodies were similar, in both case the scFv portions either engaging human HER2 or human CD3 epsilon had retained their good thermo-stability profiles with Tm in the range of 68° C. FAB portions in both antibodies had Tm in the range of 82-83° C. (FIG. 16C).

[0324] Another example of BEAT antibodies targeting both human HER2 antigen and human CD3 epsilon using the humanized Herceptin VH and VL sequences is formatted as follows: a BEAT HER2/CD3 is engineered using a combination of antigen binding sites described in Example 2.1 and 2.2 for the anti-human CD3 epsilon and the anti-human HER2 antigen binding sites, respectively. The anti-human HER2 arm of the hetero-dimeric immunoglobulin consists of a BEAT heavy chain (SEQ ID NO: 310) encompassing a variable heavy chain region, a CH1 γ1 region, a γ1 hinge region, a γ3 CH2 region with L234A and L235A substitutions (EU numbering), and a γ3 based BEAT CH3 domain assembled with its cognate light chain (SEQ ID NO: 3). This heavy chain encompasses part of a human IgG3 Fc region and therefore has no binding to Protein A but since the heavy chain used herein has its heavy chain variable domain originating from a VH3 framework, the VH domain is mutated to include the G65S substitution thereby removing any additional Protein A binding sites within the heavy chain.

[0325] The anti-human CD3 epsilon arm of the hetero-dimeric immunoglobulin consists of a BEAT heavy chain (SEQ ID NO: 311) encompassing a scFv fragment, a CH1 γ1 region, a γ1 hinge region, a γ1 CH2 region with L234A and L235A substitutions (EU numbering), and a γ1 based BEAT CH3 domain. This bispecific antibody is referred herein as BEAT HER2/CD3(SP34-Kappa2) antibody.

### In Vitro T Cell Killing Assays

[0326] The mechanism of action of BEAT HER2/CD3 antibodies is based on targeting cytotoxic T cell killing towards targeted cells by bridging the CD3 antigen on the cell surface of cytotoxic T cells and the HER2 antigen expressed on targeted cells.

[0327] The potency of BEAT HER2/CD3-1 and BEAT HER2/CD3-2 antibodies to redirect T cell killing was measured using a flow cytometry based method (referred herein as RDL-FACS method) or a colorimetric based method (referred herein as RDL-MTS method). The high expressing HER2 cell line JIMT-1, a Herceptin® (trastuzumab) resistant breast carcinoma cell line, the high expressing HER2 cell line BT-474, a Herceptin® (trastuzumab) sensitive breast carcinoma cell line and the low HER2 expressing breast adenocarcinoma cell line MDA-MB-231 were individually cultured during 48 h in the presence of human PBMCs and serial dilutions of BEAT HER2/CD3-1 or -2 antibodies or control antibodies. In these assays, human PBMCs from blood donations were used a source of cytotoxic T lymphocytes. An effector to target cells ratio of 10:1 was used in all assays. Negative controls were provided in the form of samples without antibody treatment (target cells and human PBMCs only). The cytotoxicity was determined using the RDL-FACS or RDL-MTS methods after the incubation period (see Materials and Methods section). The results showed that control antibodies did not trigger specific T cell-mediated cytotoxicity. In contrast BEAT HER2/CD3-1 and -2 antibodies induced a very potent, dose dependent, tumor target cell death. Maximum killing was close to 100%. Both readout methods gave close results. Donor-to-donor variability accounted for about a tenfold different in EC₅₀ between the methods. Measured EC₅₀s correlated to the level of HER2 antigen expression by the target cell lines.

[0328] BT-474 cells express the most HER2 antigen and EC₅₀s for both BEAT HER2/CD3-1 and -2 antibodies were in the sub-picomolar to picomolar range (0.6 and 2 pM, respectively, FIG. 17A). JIMT-1 cells have masked HER2 antigen on their cell surface (Nagy P et al. (2005), Cancer Res, 65(2): 473-482) and consequently exhibit low Herceptin® binding in spite of having high HER2 expression. Surprisingly, both BEAT HER2/CD3-1 and -2 antibodies had EC₅₀s in the picomolar range against JIMT-1 cells as measured by the RDL-MTS method (21 and 16 pM, respectively; FIG. 17B). When measured with the RDL-FACS method, the BEAT HER2/CD3-1 antibody had an EC₅₀ of 1.4 pM. Low HER2 expressing breast adenocarcinoma cell line MDA-MB-231 was less sensitive than the previous two cell lines with both antibodies exhibiting sub-nanomolar EC₅₀s (both values close to 0.2 nM; FIG. 17C). When measured with the RDL-FACS method, the BEAT HER2/CD3-1 antibody had an EC₅₀ of 0.08 nM. Taken together, these results show that BEAT HER2/CD3-1 and -2 antibodies were highly potent at redirecting T cell killing against various HER2 expressing breast cancer cell lines.

[0329] The BEAT HER2/CD3(SP34) antibody encompassed a humanized version of the anti-human CD3 epsilon antibody (SP34) described in PCT Publication No: WO2008119565. The ability of this BEAT antibody format to redirect T cell killing towards HER2+ cells was investigated in vitro. Two different HER2+ cell lines were used in killing assays, a high HER2 expressing cell line (NCI-N87) and a low HER2 expressing cell line (HT-1080) (See Materials and Methods section). FIG. 17D-E show T cell redirected killing of NCI-N87 and HT-1080 cells by the BEAT HER2/CD3(SP34) antibody, respectively. The assays used an effector cells to target cells ratio of 10 to 1, and the RDL-MTS readout method after a 48 h incubation period (see Materials and Methods section). The results show that the BEAT HER2/CD3(SP34) antibody was highly potent at redirecting T cell killing against HER2+ cell lines with EC₅₀s of 0.35 and 29 pM when targeting NCI-N87 and HT-1080 cells, respectively.

[0330] The BEAT HER2/CD3(SP34-Kappa1) antibody encompassed the humanized version of the anti-human CD3 epsilon antibody (SP34-Kappa1) VH1/VL21 described in Example 2.1. The ability of this BEAT antibody format to redirect T cell killing towards HER2+ cells was investigated in vitro. Two different HER2+ cell lines were used in killing assays, a high HER2 expressing cell line (NCI-N87) and a low HER2 expressing cell line (HT-1080) (See Materials and Methods section). FIG. 17F-G show T cell redirected killing of NCI-N87 and HT-1080 cells by the BEAT HER2/CD3(SP34-Kappa1) antibody, respectively. The assays used an effector cells to target cells ratio of 10 to 1, and the RDL-MTS readout method after a 48 h incubation period (see Materials and Methods section). The results show that the BEAT HER2/CD3(SP34-Kappa1) antibody was highly potent at redirecting T cell killing against HER2+ cell lines with EC₅₀s of 0.46 and 338 pM when targeting NCI-N87 and HT-1080 cells, respectively.

### In Vivo Efficacy Studies

### JIMT-1 Xenografts

[0331] The in vivo efficacy of the BEAT HER2/CD3-1 antibody was investigated using a JIMT-1/PBMC xenograft model. Human PBMCs from blood donations were used a source of cytotoxic T lymphocytes. Hercepting resistant breast carcinoma JIMT-1 cells were mixed at a 1:1 ratio with non-stimulated human PBMCs (four different donors) and subsequently injected subcutaneously in immunodeficiency (NOD/SCID) mice. Following engraftment, animals were treated with the BEAT HER2/CD3-1 antibody intravenously three times per week during two weeks. Antibody treatment started 3 hours after engraftment and continued on day 2, 4, 7, 9 and 11 thereafter.

[0332] To assess tumour growth without PBMCs, one cohort out of five was inoculated subcutaneously with 5×10e6 JIMT-1 cells in the absence of human PBMCs, whereas the remaining cohorts were subcutaneously injected with mixtures of 5×10e6 JIMT-1 cells mixed with 5×10e6 non-stimulated human PBMCs from healthy donors.

[0333] Human PBMCs, in the absence of antibody did not show a negative effect on tumour growth (FIG. 18A). Treatment with the BEAT HER2/CD3-1 antibody, in the presence of human effector cells induced a complete suppression of tumour growth in most of the animals (18/20 tumours, FIG. 18B-C). Eighteen days after the last day of treatment, only 11% of tumours (2/18) started to grow again. These data show very clearly the potent antitumor efficacy of the BEAT HER2/CD3-1 antibody.

### Examples of CD38/CD3 Targeting BEAT Antibodies

[0334] Anti-CD38 and anti-CD3 epsilon arms can be formatted either as a scFv-Fc type of heavy chains consisting of a scFv fragment fused to a BEAT chain or as a heavy chain consisting of a FAB fragment fused to a BEAT chain similar to that of a naturally occurring antibody. The FAB based heavy chain requires its association with its cognate light chain to assemble into a functional antigen binding site. L234A and L235A substitutions were introduced in CH2 regions and residual Protein A binding was abrogated within using the G65S or N82aS substitutions (Kabat numbering) when appropriate. Examples of BEAT antibodies targeting both human CD38 antigen and human CD3 epsilon were formatted as follows:

[0335] A first example of BEAT antibodies targeting both human CD38 antigen and human CD3 epsilon using the humanized HB7 bestfit VH and VL sequences was formatted as follows: A BEAT CD38/CD3 antibody was engineered using a combination of antigen binding sites described in Example 2.1 and 2.3 for the anti-human CD3 epsilon and the anti-human CD38 arms, respectively. The anti-human CD38 arm of the hetero-dimeric immunoglobulin consisted of a BEAT heavy chain (SEQ ID NO: 169) encompassing a variable heavy chain region, a CH1 γ1 region, a γ1 hinge region, a γ1 CH2 region with L234A and L235A substitutions (EU numbering), and a γ1 based BEAT CH3 domain assembled with its cognate light chain (SEQ ID NO: 119). The anti-human CD3 epsilon arm of the hetero-dimeric immunoglobulin consisted of a BEAT heavy chain (SEQ ID NO: 162) encompassing a scFv fragment, a CH1 γ1 region, a γ1 hinge region, a γ3 CH2 region with L234A and L235A substitutions (EU numbering), and a γ3 based BEAT CH3 domain. This heavy chain encompassed part of a human IgG3 Fc region and therefore had no binding to Protein A but since the heavy chain used herein had its heavy chain variable domain originating from a VH3 framework, the VH domain was mutated to include the N82aS substitution thereby removing any additional Protein A binding sites within the heavy chain. This arm is equivalent to the BEAT HER2/CD3-2 anti-CD3 epsilon arm described above (see FIG. 12A format B). The bispecific antibody is referred herein as BEAT CD38-HB7bestfit/CD3 antibody (FIG. 19 format A).

[0336] The BEAT CD38-HB7bestfit/CD3 antibody was expressed transiently, purified and tested in vitro for its affinity towards the CD38 and CD3 epsilon antigens, its stability and its ability to redirect T cell killing. The KD value was 3.2 nM for the human CD38 antigen (measured by SPR; FIG. 20A). DSC profiles for the bispecific antibody showed good thermo-stability profiles with a Tm of approximately 68° C. for the scFv portion. The FAB portion had a Tm of approximately 91° C. (FIG. 20B).

[0337] CD38 expressing cell lines (see Materials and Methods section) were used to assess redirected T cell killing in assays similar to that of described in Example 3.2.1. FIG. 21 shows T cell redirected killing of RPMI 8226 myeloma cells using the BEAT CD38-HB7bestfit/CD3 antibody. Note that the assay used purified T cells as effector cells with an effector cells to target cells ratio of 10 to 1. When measured with the RDL-FACS method, the BEAT CD38-HB7bestfit/CD3 antibody had an EC₅₀ of 2.2 pM (mean of 2 donors, 48 h incubation).

[0338] A second example of BEAT antibodies targeting both human CD38 antigen and human CD3 epsilon using the human clone 767 VH and VL sequences was formatted as follows: a BEAT CD38/CD3 antibody was engineered using a combination of antigen binding sites described in Example 2.1 and 2.3 for the anti-human CD3 epsilon and the anti-human CD38 arms, respectively. The anti-human CD38 arm of the hetero-dimeric immunoglobulin consisted of a BEAT heavy chain (SEQ ID NO: 170) encompassing a variable heavy chain region, a CH1 γ1 region, a γ1 hinge region, a γ1 CH2 region with L234A and L235A substitutions (EU numbering), and a γ1 based BEAT CH3 domain assembled with its cognate light chain (SEQ ID NO: 138). The anti-human CD3 epsilon arm of the hetero-dimeric immunoglobulin consisted of a BEAT heavy chain (SEQ ID NO: 171) encompassing a scFv fragment, a CH1 γ1 region, a γ1 hinge region, a γ3 CH2 region with L234A and L235A substitutions (EU numbering), and a γ3 based BEAT CH3 domain. This heavy chain encompassed part of a human IgG3 Fc region and therefore had no binding to Protein A but since the heavy chain used herein had its heavy chain variable domain originating from a VH3 framework, the VH domain was mutated to include the G65S substitution thereby removing any additional Protein A binding sites within the heavy chain. This bispecific antibody is referred herein as BEAT CD38-767/CD3 antibody (FIG. 19 format B).

[0339] The BEAT CD38-767/CD3 antibody was expressed transiently, purified and tested in vitro for its affinity towards the CD38 and CD3 epsilon antigens, its stability and its ability to redirect T cell killing. CD38 expressing cell lines (see Materials and Methods section) were used to assess redirected T cell killing in assays similar to that of described in Example 3.2.1. FIG. 22 shows T cell redirected killing of Daudi cells using the BEAT CD38-767/CD3 antibody. Note that the assay used human PBMCs as effector cells with an effector cells to target cells ratio of 10:1. When measured with the RDL-FACS method, the BEAT CD38-767/CD3 antibody had an EC₅₀ of 244 pM (mean of 3 donors, 24 h incubation).

[0340] Another example of BEAT antibodies targeting both human CD38 antigen and human CD3 epsilon using the humanized 9G7 best-framework VH and VL sequences is formatted as follows: a BEAT CD38/CD3 is engineered using a combination of antigen binding sites described in Example 2.1 and 2.3 for the anti-human CD3 epsilon and the anti-human CD38 antigen binding sites, respectively. The anti-human CD38 arm of the hetero-dimeric immunoglobulin consists of a BEAT heavy chain (SEQ ID NO: 312) encompassing a variable heavy chain region, a CH1 γ1 region, a γ1 hinge region, a γ3 CH2 region with L234A and L235A substitutions (EU numbering), and a γ3 based BEAT CH3 domain assembled with its cognate light chain (SEQ ID NO: 132). This heavy chain encompasses part of a human IgG3 Fc region and therefore has no binding to Protein A but since the heavy chain used herein has its heavy chain variable domain originating from a VH3 framework, the VH domain is mutated to include the G65S substitution thereby removing any additional Protein A binding sites within the heavy chain. The anti-human CD3 epsilon arm of the hetero-dimeric immunoglobulin consists of a BEAT heavy chain (SEQ ID NO: 311) encompassing a scFv fragment, a CH1 γ1 region, a γ1 hinge region, a γ1 CH2 region with L234A and L235A substitutions (EU numbering), and a γ1 based BEAT CH3 domain. This bispecific antibody is referred herein as BEAT CD38-9G7bestframework/CD3(SP34-Kappa2) antibody.

[0341] Another example of BEAT antibodies targeting both human CD38 antigen and human CD3 epsilon using the human clone 767 VH and VL sequences is formatted as follows: a BEAT CD38/CD3 is engineered using a combination of antigen binding sites described in Example 2.1 and 2.3 for the anti-human CD3 epsilon and the anti-human CD38 antigen binding sites, respectively. The anti-human CD38 arm of the hetero-dimeric immunoglobulin consists of a BEAT heavy chain (SEQ ID NO: 313) encompassing a variable heavy chain region, a CH1 γ1 region, a γ1 hinge region, a γ3 CH2 region with L234A and L235A substitutions (EU numbering), and a γ3 based BEAT CH3 domain assembled with its cognate light chain (SEQ ID NO: 138). This heavy chain encompasses part of a human IgG3 Fc region and therefore has no binding to Protein A but since the heavy chain used herein has its heavy chain variable domain originating from a VH3 framework, the VH domain is mutated to include the G65S substitution thereby removing any additional Protein A binding sites within the heavy chain. The anti-human CD3 epsilon arm of the hetero-dimeric immunoglobulin consists of a BEAT heavy chain (SEQ ID NO: 311) encompassing a scFv fragment, a CH1 γ1 region, a γ1 hinge region, a γ1 CH2 region with L234A and L235A substitutions (EU numbering), and a γ1 based BEAT CH3 domain. This bispecific antibody is referred herein as BEAT CD38-767/CD3(SP34-Kappa2) antibody.

### Examples of OX40/CD3 Targeting BEAT Antibodies

[0342] Anti-OX40 and anti-CD3 epsilon arms can be formatted either as a scFv-Fc type of heavy chains consisting of a scFv fragment fused to a BEAT chain or as a heavy chain consisting of a FAB fragment fused to a BEAT chain similar to that of a naturally occurring antibody. The FAB based heavy chain requires its association with its cognate light chain to assemble into a functional antigen binding site. L234A and L235A substitutions were introduced in CH2 regions and residual Protein A binding was abrogated within using the G65S or N82aS substitutions (Kabat numbering) when appropriate. Examples of BEAT antibodies targeting both human OX40 antigen and human CD3 epsilon were formatted as follows:

[0343] An example of BEAT OX40/CD3 antibody was engineered using a combination of antigen binding sites described in Example 2.1 and 2.4 for the anti-human CD3 epsilon and the anti-human OX40 arms, respectively. The anti-human OX40 arm of the hetero-dimeric immunoglobulin used the variable domains of the humanized anti-human OX40 antibody disclosed in PCT Publication No: WO2013008171 (variable heavy chain and light chain domains with SEQ ID NO: 141 and 142, respectively) and consisted of a BEAT heavy chain (SEQ ID NO: 172) encompassing a variable heavy chain region, a CH1 γ1 region, a γ1 hinge region, a γ1 CH2 region with L234A and L235A substitutions (EU numbering), and a γ1 based BEAT CH3 domain assembled with its cognate light chain (SEQ ID NO: 173). The anti-human CD3 epsilon arm of the hetero-dimeric immunoglobulin consisted of a BEAT heavy chain (SEQ ID NO: 162) encompassing a scFv fragment, a CH1 γ1 region, a γ1 hinge region, a γ3 CH2 region with L234A and L235A substitutions (EU numbering), and a γ3 based BEAT CH3 domain. This heavy chain encompassed part of a human IgG3 Fc region and therefore had no binding to Protein A but since the heavy chain used herein had its heavy chain variable domain originating from a VH3 framework, the VH domain was mutated to include the N82aS substitution thereby removing any additional Protein A binding sites within the heavy chain. This arm is equivalent to the BEAT HER2/CD3-2 anti-CD3 epsilon arm described above (see FIG. 12A format B). The bispecific antibody is referred herein as BEAT OX40/CD3 antibody (FIG. 23).

[0344] The ability of the BEAT OX40/CD3 antibody to redirect T cell killing towards OX40+ cells was investigated in vitro. The stable recombinant CHO[OX40] cell line was used in killing assays. FIG. 24 show T cell redirected killing of stable recombinant CHO[OX40] cells by the BEAT OX40/CD3 antibody. The assays used human PBMCs as effector cells with an effector cells to target cells ratio of 20 to 1, and the RDL-MTS readout method after a 48 h incubation period (see Materials and Methods section). The results show that the BEAT OX40/CD3 antibody was highly potent at redirecting T cell killing against the stable recombinant CHO[OX40] cells with an EC₅₀ of 0.5 nM (mean of 3 donors).

[0345] Another example of BEAT antibodies targeting both human OX40 antigen and human CD3 epsilon using the humanized anti-OX40/maxgraft VH and VL sequences is formatted as follows: a BEAT OX40/CD3 is engineered using a combination of antigen binding sites described in Example 2.1 and 2.4 for the anti-human CD3 epsilon and the anti-human OX40 antigen binding sites, respectively. The anti-human OX40 arm of the hetero-dimeric immunoglobulin consists of a BEAT heavy chain (SEQ ID NO: 314) encompassing a variable heavy chain region, a CH1 γ1 region, a γ1 hinge region, a γ3 CH2 region with L234A and L235A substitutions (EU numbering), and a γ3 based BEAT CH3 domain assembled with its cognate light chain (SEQ ID NO: 315). This heavy chain encompasses part of a human IgG3 Fc region and therefore has no binding to Protein A but since the heavy chain used herein has its heavy chain variable domain originating from a VH3 framework, the VH domain is mutated to include the G65S substitution thereby removing any additional Protein A binding sites within the heavy chain. The anti-human CD3 epsilon arm of the hetero-dimeric immunoglobulin consists of a BEAT heavy chain (SEQ ID NO: 311) encompassing a scFv fragment, a CH1 γ1 region, a γ1 hinge region, a γ1 CH2 region with L234A and L235A substitutions (EU numbering), and a γ1 based BEAT CH3 domain. This bispecific antibody is referred herein as BEAT OX40maxgraft/CD3(SP34-Kappa2) antibody.

[0346] Another example of BEAT antibodies targeting both human OX40 antigen and human CD3 epsilon using the humanized anti-OX40/mingraft VH and VL sequences is formatted as follows: a BEAT OX40/CD3 is engineered using a combination of antigen binding sites described in Example 2.1 and 2.4 for the anti-human CD3 epsilon and the anti-human OX40 antigen binding sites, respectively. The anti-human OX40 arm of the hetero-dimeric immunoglobulin consists of a BEAT heavy chain (SEQ ID NO: 316) encompassing a variable heavy chain region, a CH1 γ1 region, a γ1 hinge region, a γ3 CH2 region with L234A and L235A substitutions (EU numbering), and a γ3 based BEAT CH3 domain assembled with its cognate light chain (SEQ ID NO: 317). This heavy chain encompasses part of a human IgG3 Fc region and therefore has no binding to Protein A but since the heavy chain used herein has its heavy chain variable domain originating from a VH3 framework, the VH domain is mutated to include the G65S substitution thereby removing any additional Protein A binding sites within the heavy chain. The anti-human CD3 epsilon arm of the hetero-dimeric immunoglobulin consists of a BEAT heavy chain (SEQ ID NO: 311) encompassing a scFv fragment, a CH1 γ1 region, a γ1 hinge region, a γ1 CH2 region with L234A and L235A substitutions (EU numbering), and a γ1 based BEAT CH3 domain. This bispecific antibody is referred herein as BEAT OX40mingraft/CD3(SP34-Kappa2) antibody.

### Examples of CD20/CD3 Targeting BEAT Antibodies

[0347] An example of BEAT antibodies targeting both human CD20 antigen and human CD3 epsilon using the mouse rituximab antibody VH and VL sequences was formatted as follows: A BEAT CD20/CD3 was engineered using a combination of antigen binding sites described in Example 2.1 and 2.5 for the anti-human CD3 epsilon and the anti-human CD20 arms, respectively.

[0348] An example of BEAT antibodies targeting both human CD20 antigen and human CD3 epsilon using the humanized rituximab/maxgraft VH and VL sequences is formatted as follows: a BEAT CD20/CD3 is engineered using a combination of antigen binding sites described in Example 2.1 and 2.5 for the anti-human CD3 epsilon and the anti-human CD20 antigen binding sites, respectively. The anti-human CD20 arm of the hetero-dimeric immunoglobulin consists of a BEAT heavy chain (SEQ ID NO: 318) encompassing a variable heavy chain region, a CH1 γ1 region, a γ1 hinge region, a γ3 CH2 region with L234A and L235A substitutions (EU numbering), and a γ3 based BEAT CH3 domain assembled with its cognate light chain (SEQ ID NO: 319). This heavy chain encompasses part of a human IgG3 Fc region and therefore has no binding to Protein A but since the heavy chain used herein has its heavy chain variable domain originating from a VH3 framework, the VH domain is mutated to include the G65S substitution thereby removing any additional Protein A binding sites within the heavy chain. The anti-human CD3 epsilon arm of the hetero-dimeric immunoglobulin consists of a BEAT heavy chain (SEQ ID NO: 311) encompassing a scFv fragment, a CH1 γ1 region, a γ1 hinge region, a γ1 CH2 region with L234A and L235A substitutions (EU numbering), and a γ1 based BEAT CH3 domain. This bispecific antibody is referred herein as BEAT CD20maxgraft/CD3(SP34-Kappa2) antibody.

[0349] Another example of BEAT antibodies targeting both human CD20 antigen and human CD3 epsilon using the humanized rituximab/mingraft VH and VL sequences is formatted as follows: a BEAT CD20/CD3 is engineered using a combination of antigen binding sites described in Example 2.1 and 2.5 for the anti-human CD3 epsilon and the anti-human CD20 antigen binding sites, respectively. The anti-human CD20 arm of the hetero-dimeric immunoglobulin consists of a BEAT heavy chain (SEQ ID NO: 320) encompassing a variable heavy chain region, a CH1 γ1 region, a γ1 hinge region, a γ3 CH2 region with L234A and L235A substitutions (EU numbering), and a γ3 based BEAT CH3 domain assembled with its cognate light chain (SEQ ID NO: 321). This heavy chain encompasses part of a human IgG3 Fc region and therefore has no binding to Protein A but since the heavy chain used herein has its heavy chain variable domain originating from a VH3 framework, the VH domain is mutated to include the G65S substitution thereby removing any additional Protein A binding sites within the heavy chain. The anti-human CD3 epsilon arm of the hetero-dimeric immunoglobulin consists of a BEAT heavy chain (SEQ ID NO: 311) encompassing a scFv fragment, a CH1 γ1 region, a γ1 hinge region, a γ1 CH2 region with L234A and L235A substitutions (EU numbering), and a γ1 based BEAT CH3 domain. This bispecific antibody is referred herein as BEAT CD20mingraft/CD3(SP34-Kappa2) antibody.

### Examples of EGFR/CD3 Targeting BEAT Antibodies

[0350] Anti-EGFR and anti-CD3 epsilon arms can be formatted either as a scFv-Fc type of heavy chains consisting of a scFv fragment fused to a BEAT chain or as a heavy chain consisting of a FAB fragment fused to a BEAT chain similar to that of a naturally occurring antibody. The FAB based heavy chain requires its association with its cognate light chain to assemble into a functional antigen binding site. L234A and L235A substitutions were introduced in CH2 regions and residual Protein A binding was abrogated within using the G65S or N82aS substitutions (Kabat numbering) when appropriate. Examples of BEAT antibodies targeting both human EGFR antigen and human CD3 epsilon were formatted as follows:

[0351] An example of BEAT antibodies targeting both human EGFR and human CD3 epsilon antigens is formatted as follows: a BEAT EGFR/CD3 is engineered using a combination of antigen binding sites described in Example 2.1 and 2.6 for the anti-human CD3 epsilon and the anti-human EGFR arms, respectively. The anti-human EGFR arm of the hetero-dimeric immunoglobulin consisted of a BEAT heavy chain (SEQ ID NO: 174) based on the mouse Erbitux antibody variable domains (mouse variable heavy and light chain domains with SEQ ID NO: 145 and 146, respectively) that encompassed a variable heavy chain region, a CH1 γ1 region, a γ1 hinge region, a γ1 CH2 region with L234A and L235A substitutions (EU numbering), and a γ1 based BEAT CH3 domain assembled with its cognate light chain (SEQ ID NO: 175). The anti-human CD3 epsilon arm of the hetero-dimeric immunoglobulin consisted of a BEAT heavy chain (SEQ ID NO: 171) encompassing a scFv fragment, a CH1 γ1 region, a γ1 hinge region, a γ3 CH2 region with L234A and L235A substitutions (EU numbering), and a γ3 based BEAT CH3 domain. This heavy chain encompassed part of a human IgG3 Fc region and therefore had no binding to Protein A but since the heavy chain used herein had its heavy chain variable domain originating from a VH3 framework, the VH domain was mutated to include the G65S substitution thereby removing any additional Protein A binding sites within the heavy chain. This arm is equivalent to the BEAT CD38-767/CD3 anti-CD3 epsilon arm described above (see FIG. 19 format B). The bispecific antibody is referred herein as BEAT EGFR/CD3 antibody (FIG. 25).

[0352] The BEAT EGFR/CD3 antibody was transiently expressed, purified and tested in vitro for its ability to redirect T cell killing against human EGFR+ cell lines. The HT-29 cell line was used in killing assays. FIG. 26 show T cell redirected killing of HT-29 cells by the BEAT EGFR/CD3 antibody. The assays used human PBMCs as effector cells with an effector cells to target cells ratio of 10 to 1, and the RDL-MTS readout method after a 48 h incubation period (see Materials and Methods section). The results show that the BEAT EGFR/CD3 antibody was highly potent at redirecting T cell killing against HT-29 cells with an EC₅₀ of 70.6 pM (mean of 4 donors).

[0353] Another example of BEAT antibodies targeting both human EGFR antigen and human CD3 epsilon using the humanized Erbitux/maxgraft VH and VL sequences is formatted as follows: a BEAT EGFR/CD3 is engineered using a combination of antigen binding sites described in Example 2.1 and 2.6 for the anti-human CD3 epsilon and the anti-human EGFR antigen binding sites, respectively. The anti-human EGFR arm of the hetero-dimeric immunoglobulin consists of a BEAT heavy chain (SEQ ID NO: 322) encompassing a variable heavy chain region, a CH1 γ1 region, a γ1 hinge region, a γ3 CH2 region with L234A and L235A substitutions (EU numbering), and a γ3 based BEAT CH3 domain assembled with its cognate light chain (SEQ ID NO: 323). This heavy chain encompasses part of a human IgG3 Fc region and therefore has no binding to Protein A but since the heavy chain used herein has its heavy chain variable domain originating from a VH3 framework, the VH domain is mutated to include the G65S substitution thereby removing any additional Protein A binding sites within the heavy chain. The anti-human CD3 epsilon arm of the hetero-dimeric immunoglobulin consists of a BEAT heavy chain (SEQ ID NO: 311) encompassing a scFv fragment, a CH1 γ1 region, a γ1 hinge region, a γ1 CH2 region with L234A and L235A substitutions (EU numbering), and a γ1 based BEAT CH3 domain. This bispecific antibody is referred herein as BEAT EGFRcetux-maxgraft-CD3(SP34-Kappa2) antibody.

[0354] Another example of BEAT antibodies targeting both human EGFR antigen and human CD3 epsilon using the humanized Erbitux/mingraft VH and VL sequences is formatted as follows: a BEAT EGFR/CD3 is engineered using a combination of antigen binding sites described in Example 2.1 and 2.6 for the anti-human CD3 epsilon and the anti-human EGFR antigen binding sites, respectively. The anti-human EGFR arm of the hetero-dimeric immunoglobulin consists of a BEAT heavy chain (SEQ ID NO: 324) encompassing a variable heavy chain region, a CH1 γ1 region, a γ1 hinge region, a γ3 CH2 region with L234A and L235A substitutions (EU numbering), and a γ3 based BEAT CH3 domain assembled with its cognate light chain (SEQ ID NO: 325). This heavy chain encompasses part of a human IgG3 Fc region and therefore has no binding to Protein A but since the heavy chain used herein has its heavy chain variable domain originating from a VH3 framework, the VH domain is mutated to include the G65S substitution thereby removing any additional Protein A binding sites within the heavy chain. The anti-human CD3 epsilon part of the hetero-dimeric immunoglobulin consists of a BEAT heavy chain (SEQ ID NO: 311) encompassing a scFv fragment, a CH1 γ1 region, a γ1 hinge region, a γ1 CH2 region with L234A and L235A substitutions (EU numbering), and a γ1 based BEAT CH3 domain. This bispecific antibody is referred herein as BEAT EGFRcetux-mingraft/CD3(SP34-Kappa2) antibody.

[0355] Another example of BEAT antibodies targeting both human EGFR antigen and human CD3 epsilon using the humanized Vectibix/maxgraft VH and VL sequences is formatted as follows: a BEAT EGFR/CD3 is engineered using a combination of antigen binding sites described in Example 2.1 and 2.6 for the anti-human CD3 epsilon and the anti-human EGFR antigen binding sites, respectively. The anti-human EGFR arm of the hetero-dimeric immunoglobulin consists of a BEAT heavy chain (SEQ ID NO: 326) encompassing a variable heavy chain region, a CH1 γ1 region, a γ1 hinge region, a γ3 CH2 region with L234A and L235A substitutions (EU numbering), and a γ3 based BEAT CH3 domain assembled with its cognate light chain (SEQ ID NO: 327). This heavy chain encompasses part of a human IgG3 Fe region and therefore has no binding to Protein A but since the heavy chain used herein has its heavy chain variable domain originating from a VH3 framework, the VH domain is mutated to include the G65S substitution thereby removing any additional Protein A binding sites within the heavy chain.

[0356] The anti-human CD3 epsilon arm of the hetero-dimeric immunoglobulin consists of a BEAT heavy chain (SEQ ID NO: 311) encompassing a scFv fragment, a CH1 γ1 region, a γ1 hinge region, a γ1 CH2 region with L234A and L235A substitutions (EU numbering), and a γ1 based BEAT CH3 domain. This bispecific antibody is referred herein as BEAT EGFRpani-maxgraft/CD3(SP34-Kappa2) antibody.

[0357] Another example of BEAT antibodies targeting both human EGFR antigen and human CD3 epsilon using the humanized Vectibix/mingraft VH and VL sequences is formatted as follows: a BEAT EGFR/CD3 is engineered using a combination of antigen binding sites described in Example 2.1 and 2.6 for the anti-human CD3 epsilon and the anti-human EGFR antigen binding sites, respectively. The anti-human EGFR arm of the hetero-dimeric immunoglobulin consists of a BEAT heavy chain (SEQ ID NO: 328) encompassing a variable heavy chain region, a CH1 γ1 region, a γ1 hinge region, a γ3 CH2 region with L234A and L235A substitutions (EU numbering), and a γ3 based BEAT CH3 domain assembled with its cognate light chain (SEQ ID NO: 329). This heavy chain encompasses part of a human IgG3 Fc region and therefore has no binding to Protein A but since the heavy chain used herein has its heavy chain variable domain originating from a VH3 framework, the VH domain is mutated to include the G65S substitution thereby removing any additional Protein A binding sites within the heavy chain. The anti-human CD3 epsilon arm of the hetero-dimeric immunoglobulin consists of a BEAT heavy chain (SEQ ID NO: 311) encompassing a scFv fragment, a CH1 γ1 region, a γ1 hinge region, a γ1 CH2 region with L234A and L235A substitutions (EU numbering), and a γ1 based BEAT CH3 domain. This bispecific antibody is referred herein as BEAT EGFRpani-mingraft/CD3(SP34-Kappa2) antibody.

### Examples of CD19/CD3 BEAT Antibodies

[0358] Anti-CD19 and anti-CD3 heavy chains can be formatted either as a scFv-Fc type of heavy chains consisting of a scFv fragment fused to a first BEAT chain or as a heavy chain consisting of a FAB fragment fused to a first BEAT chain similar to that of a naturally occurring antibody. The FAB based heavy chain requires its association with its cognate light chain to assemble into a functional antigen binding site. L234A and L235A substitutions were introduced in CH2 regions and residual Protein A binding was abrogated within using the G65S or N82aS substitutions (Kabat numbering) when appropriate. An example of BEAT antibodies targeting both human CD19 antigen and human CD3 epsilon using anti-CD19 VH and VL sequences described in WO2010095031 is formatted as follows:

[0359] An example of BEAT CD19/CD3 is engineered using a combination of antigen binding sites described in Example 2.1 and 2.7 for the anti-human CD3 epsilon and the anti-human CD19 antigen binding sites, respectively. The anti-human CD19 arm of the hetero-dimeric immunoglobulin consists of a BEAT heavy chain (SEQ ID NO: 330) encompassing a variable heavy chain region, a CH1 γ1 region, a γ1 hinge region, a γ3 CH2 region with L234A and L235A substitutions (EU numbering), and a γ3 based BEAT CH3 domain assembled with its cognate light chain (SEQ ID NO: 331). This heavy chain encompasses part of a human IgG3 Fc region and therefore has no binding to Protein A but since the heavy chain used herein has its heavy chain variable domain originating from a VH3 framework, the VH domain is mutated to include the G65S substitution thereby removing any additional Protein A binding sites within the heavy chain. The anti-human CD3 epsilon arm of the hetero-dimeric immunoglobulin consists of a BEAT heavy chain (SEQ ID NO: 311) encompassing a scFv fragment, a CH1 γ1 region, a γ1 hinge region, a γ1 CH2 region with L234A and L235A substitutions (EU numbering), and a γ1 based BEAT CH3 domain. This bispecific antibody is referred herein as BEAT CD19/CD3(SP34-Kappa2) antibody.

[0360] CD19 expressing cell lines described in PCT Publication No: WO2010/095031 are used to assess redirected T cell killing in assays similar to that of described in Example 3.2.1.

### Examples of IgE/CD3 BEAT Antibodies

[0361] Anti-IgE and anti-CD3 heavy chains can be formatted either as a scFv-Fc type of heavy chains consisting of a scFv fragment fused to a first BEAT chain or as a heavy chain consisting of a FAB fragment fused to a first BEAT chain similar to that of a naturally occurring antibody. The FAB based heavy chain requires its association with its cognate light chain to assemble into a functional antigen binding site. L234A and L235A substitutions were introduced in CH2 regions and residual Protein A binding was abrogated within using the G65S or N82aS substitutions (Kabat numbering) when appropriate. BEAT IgE/CD3 antibodies are engineered using a combination of antigen binding sites described in Example 2.1 and 2.8 for the anti-human CD3 epsilon and the anti-human IgE antigen binding sites, respectively. Cell lines expressing IgE on their cell surface are described in PCT Publication No: WO2010/033736 and can used to assess redirected T cell killing in assays similar to that of described in Example 3.2.1.

[0362] An example of BEAT antibodies targeting both human IgE antigen and human CD3 epsilon using the stabilized omalizumab/maxgraft VH and VL sequences is formatted as follows: The anti-human IgE arm of the hetero-dimeric immunoglobulin consists of a BEAT heavy chain (SEQ ID NO: 332) encompassing a variable heavy chain region, a CH1 γ1 region, a γ1 hinge region, a γ3 CH2 region with L234A and L235A substitutions (EU numbering), and a γ3 based BEAT CH3 domain assembled with its cognate light chain (SEQ ID NO: 333). This heavy chain encompasses part of a human IgG3 Fc region and therefore has no binding to Protein A but since the heavy chain used herein has its heavy chain variable domain originating from a VH3 framework, the VH domain is mutated to include the G65S substitution thereby removing any additional Protein A binding sites within the heavy chain. The anti-human CD3 epsilon arm of the hetero-dimeric immunoglobulin consists of a BEAT heavy chain (SEQ ID NO: 311) encompassing a scFv fragment, a CH1 γ1 region, a γ1 hinge region, a γ1 CH2 region with L234A and L235A substitutions (EU numbering), and a γ1 based BEAT CH3 domain. This bispecific antibody is referred herein as BEAT IgEomali-maxgraft/CD3(SP34-Kappa2) antibody.

[0363] Another example of BEAT antibodies targeting both human IgE antigen and human CD3 epsilon using the stabilized omalizumab/mingraft VH and VL sequences is formatted as follows: The anti-human IgE arm of the hetero-dimeric immunoglobulin consists of a BEAT heavy chain (SEQ ID NO: 334) encompassing a variable heavy chain region, a CH1 γ1 region, a γ1 hinge region, a γ3 CH2 region with L234A and L235A substitutions (EU numbering), and a γ3 based BEAT CH3 domain assembled with its cognate light chain (SEQ ID NO: 335). This heavy chain encompasses part of a human IgG3 Fc region and therefore has no binding to Protein A but since the heavy chain used herein has its heavy chain variable domain originating from a VH3 framework, the VH domain is mutated to include the G65S substitution thereby removing any additional Protein A binding sites within the heavy chain. The anti-human CD3 epsilon arm of the hetero-dimeric immunoglobulin consists of a BEAT heavy chain (SEQ ID NO: 311) encompassing a scFv fragment, a CH1 γ1 region, a γ1 hinge region, a γ1 CH2 region with L234A and L235A substitutions (EU numbering), and a γ1 based BEAT CH3 domain. This bispecific antibody is referred herein as BEAT IgEomali-mingraft/CD3(SP34-Kappa2)antibody.

[0364] Another example of BEAT antibodies targeting both human IgE antigen and human CD3 epsilon using the stabilized Bsw17/maxgraft VH and VL sequences is formatted as follows: The anti-human IgE arm of the hetero-dimeric immunoglobulin consists of a BEAT heavy chain (SEQ ID NO: 336) encompassing a variable heavy chain region, a CH1 γ1 region, a γ1 hinge region, a γ3 CH2 region with L234A and L235A substitutions (EU numbering), and a γ3 based BEAT CH3 domain assembled with its cognate light chain (SEQ ID NO: 337). This heavy chain encompasses part of a human IgG3 Fc region and therefore has no binding to Protein A but since the heavy chain used herein has its heavy chain variable domain originating from a VH3 framework, the VH domain is mutated to include the G65S substitution thereby removing any additional Protein A binding sites within the heavy chain. The anti-human CD3 epsilon arm of the hetero-dimeric immunoglobulin consists of a BEAT heavy chain (SEQ ID NO: 311) encompassing a scFv fragment, a CH1 γ1 region, a γ1 hinge region, a γ1 CH2 region with L234A and L235A substitutions (EU numbering), and a γ1 based BEAT CH3 domain. This bispecific antibody is referred herein as BEAT IgEbsw17-maxgraft/CD3(SP34-Kappa2) antibody.

[0365] Another example of BEAT antibodies targeting both human IgE antigen and human CD3 epsilon using the stabilized Bsw17/mingraft VH and VL sequences is formatted as follows: The anti-human IgE arm of the hetero-dimeric immunoglobulin consists of a BEAT heavy chain (SEQ ID NO: 338) encompassing a variable heavy chain region, a CH1 γ1 region, a γ1 hinge region, a γ3 CH2 region with L234A and L235A substitutions (EU numbering), and a γ3 based BEAT CH3 domain assembled with its cognate light chain (SEQ ID NO: 339). This heavy chain encompasses part of a human IgG3 Fc region and therefore has no binding to Protein A but since the heavy chain used herein has its heavy chain variable domain originating from a VH3 framework, the VH domain is mutated to include the G65S substitution thereby removing any additional Protein A binding sites within the heavy chain. The anti-human CD3 epsilon arm of the hetero-dimeric immunoglobulin consists of a BEAT heavy chain (SEQ ID NO: 311) encompassing a scFv fragment, a CH1 γ1 region, a γ1 hinge region, a γ1 CH2 region with L234A and L235A substitutions (EU numbering), and a γ1 based BEAT CH3 domain. This bispecific antibody is referred herein as BEAT IgE bsw17-mingraft/CD3(SP34-Kappa2) antibody.

### Examples of BEAT Antibodies Encompassing Only One VH3 Domain

### Examples of CD38/CD3 Targeting BEAT Antibodies

[0366] An example of BEAT antibodies targeting both human CD38 antigen and human CD3 epsilon using the humanized HB7/bestfit VH and VL sequences was formatted as follows: a BEAT CD38/CD3 was engineered using a combination of antigen binding sites described in Example 2.1 and 2.3 for the anti-human CD3 epsilon and the anti-human CD38 arms, respectively. The anti-human CD38 arm of the hetero-dimeric immunoglobulin consisted of a BEAT heavy chain (SEQ ID NO: 176) encompassing a variable heavy chain domain, a CH1 γ1 region, a γ1 hinge region, a γ3 CH2 region with L234A and L235A substitutions (EU numbering), and a γ3 based BEAT CH3 domain assembled with its cognate light chain (SEQ ID NO: 119). This heavy chain had no binding to Protein A as it encompassed part of a human IgG3 Fc region and had its heavy chain variable domain originating from a non-VH3 domain subclass. The anti-human CD3 epsilon arm of the hetero-dimeric immunoglobulin consisted of a BEAT heavy chain (SEQ ID NO: 177) encompassing a scFv fragment, a CH1 γ1 region, a γ1 hinge region, a γ1 CH2 region with L234A and L235A substitutions (EU numbering), and a γ1 based BEAT CH3 domain. This heavy chain and light assembly encompassed a humanized version of the anti-human CD3 epsilon antibody (SP34) as described in PCT Publication No: WO2008119565. This BEAT antibody format is referred herein as BEAT CD38-HB7bestfit/CD3(SP34) antibody (FIG. 27 format A).

[0367] The ability of the BEAT CD38-HB7bestfit/CD3(SP34) antibody to redirect T cell killing towards CD38+ cells was investigated in-vitro. The CD38+ B lymphoblast cell line Daudi was used in killing assays. FIG. 28 show T cell redirected killing of Daudi cells by the BEAT CD38-HB7bestfit/CD3(SP34) antibody. The assays used human PBMCs as effector cells with an effector cells to target cells ratio of 10 to 1, and the RDL-FACS readout method after a 24 h incubation period (see Materials and Methods section). The results show that the BEAT CD38-HB7bestfit/CD3(SP34) antibody was highly potent at redirecting T cell killing against the Daudi CD38+ cell line with an EC₅₀ of 1.8 pM (mean of 3 donors).

[0368] A second example of BEAT antibodies targeting both human CD38 antigen and human CD3 epsilon using the humanized 9G7 best-fit VH and VL sequences (SEQ ID NO: 129 and 130, respectively) was formatted as follows: a BEAT CD38/CD3 was engineered using a combination of antigen binding sites described in Example 2.1 and 2.3 for the anti-human CD3 epsilon and the anti-human CD38 arms, respectively. The anti-human CD38 arm of the hetero-dimeric immunoglobulin consisted of a BEAT heavy chain (SEQ ID NO: 178) encompassing a variable heavy chain domain, a CH1 γ1 region, a γ1 hinge region, a γ3 CH2 region with L234A and L235A substitutions (EU numbering), and a γ3 based BEAT CH3 domain assembled with its cognate light chain (SEQ ID NO: 128). This heavy chain had no binding to Protein A as it encompassed part of a human IgG3 Fc region and had its heavy chain variable domain originating from a non-VH3 domain subclass. The anti-human CD3 epsilon arm of the hetero-dimeric immunoglobulin consisted of a BEAT heavy chain (SEQ ID NO: 179) encompassing a scFv fragment, a CH1 γ1 region, a γ1 hinge region, a γ1 CH2 region with L234A and L235A substitutions (EU numbering), and a γ1 based BEAT CH3 domain. This arm of the bispecific antibody encompassed the variable domains of the humanized SP34 VH5/VL32 antibody described in Example 2.1. This BEAT antibody format is referred herein as BEAT CD38-9G7best-fit/CD3(SP34-Kappa2) antibody (FIG. 27 format B). CD38-9G7best-fit/CD3(SP34-Kappa2) antibody had a KD value of 18 nM for the human CD3 1-26_Fc fusion protein (FIG. 29).

[0369] The ability of the BEAT CD38-9G7best-fit/CD3(SP34-Kappa2) antibody to redirect T cell killing towards CD38+ cells was investigated in vitro. The CD38+ B lymphoblast cell line Daudi was used in killing assays. FIG. 30 show T cell redirected killing of Daudi cells by the BEAT CD38-9G7best-fit/CD3(SP34-Kappa2) antibody. The assays used human PBMCs as effector cells with an effector cells to target cells ratio of 10 to 1, and the RDL-FACS readout method after a 24 h incubation period (see Materials and Methods section). The results show that the BEAT CD38-9G7best-fit/CD3(SP34-Kappa2) antibody was highly potent at redirecting T cell killing against the Daudi CD38+ cell line with an EC₅₀ of 2 pM (mean of 3 donors).

### Examples of OX40/CD3 Targeting BEAT Antibodies

[0370] An example of BEAT antibodies targeting both human OX40 antigen and human CD3 epsilon using the humanized anti-OX40 antibody VH and VL sequences (PCT Publication No: WO2013008171) is formatted as follows: A BEAT OX40/CD3 is engineered using a combination of antigen binding sites described in Example 2.1 and 2.4 for the anti-human CD3 epsilon and the anti-human OX40 antigen binding sites, respectively. The anti-human OX40 arm of the hetero-dimeric immunoglobulin consists of a BEAT heavy chain (SEQ ID NO: 340) encompassing a variable heavy chain region, a CH1 γ1 region, a γ1 hinge region, a γ3 CH2 region with L234A and L235A substitutions (EU numbering), and a γ3 based BEAT CH3 domain assembled with its cognate light chain (SEQ ID NO: 173). This heavy chain has no binding to Protein A as it encompasses part of a human IgG3 Fc region and has its heavy chain variable domain originating from a non-VH3 domain subclass. The anti-human CD3 epsilon arm of the hetero-dimeric immunoglobulin consists of a BEAT heavy chain (SEQ ID NO: 311) encompassing a scFv fragment, a CH1 γ1 region, a γ1 hinge region, a γ1 CH2 region with L234A and L235A substitutions (EU numbering), and a γ1 based BEAT CH3 domain. This bispecific antibody is referred herein as BEAT OX40/CD3(SP34-Kappa2) antibody.

[0371] Human OX40 expressing cell lines described above are used to assess redirected T cell killing in assays similar to that of described in Example 3.2.4.

### Examples of CD20/CD3 Targeting BEAT Antibodies

[0372] An example of BEAT antibodies targeting both human CD20 antigen and human CD3 epsilon using the mouse rituximab antibody VH and VL sequences was formatted as follows: A BEAT CD20/CD3 was engineered using a combination of antigen binding sites described in Example 2.1 and 2.5 for the anti-human CD3 epsilon and the anti-human CD20 arms, respectively.

[0373] The anti-human CD20 arm of the hetero-dimeric immunoglobulin consisted of a BEAT heavy chain (SEQ ID NO: 180) based on the mouse rituximab antibody variable domains (mouse variable heavy and light chain domains with SEQ ID NO: 143 and 144, respectively) that encompassed a variable heavy chain region, a CH1 γ1 region, a γ1 hinge region, a γ3 CH2 region with L234A and L235A substitutions (EU numbering), and a γ3 based BEAT CH3 domain assembled with its cognate light chain (SEQ ID NO: 181). This heavy chain had no binding to Protein A as it encompassed part of a human IgG3 Fc region and had its heavy chain variable domain originating from a non-VH3 domain subclass. The anti-human CD3 epsilon arm of the hetero-dimeric immunoglobulin consisted of a BEAT heavy chain (SEQ ID NO: 177) encompassing a scFv fragment, a CH1 γ1 region, a γ1 hinge region, a γ1 CH2 region with L234A and L235A substitutions (EU numbering), and a γ1 based BEAT CH3 domain. This arm is equivalent to the BEAT CD38-HB7bestfit/CD3 anti-CD3 epsilon arm described above (see FIG. 27 format A). This scFv fragment encompassed a humanized version of the anti-human CD3 epsilon SP34 antibody as described in PCT Publication No: WO2008119565 (VH and VL domains with SEQ ID NO: 182 and 183, respectively). This BEAT antibody format is referred herein as BEAT CD20/CD3(SP34) antibody (FIG. 31).

[0374] The BEAT CD20/CD3(SP34) antibody was transiently expressed, purified and tested in vitro for its ability to redirect T cell killing against human CD20+ cell lines. The CD38+ B lymphoblast cell line Daudi was used in killing assays. FIG. 32 show T cell redirected killing of Daudi cells by the BEAT CD20/CD3(SP34) antibody. The assays used human PBMCs as effector cells with an effector cells to target cells ratio of 10 to 1, and the RDL-FACS readout method after a 24 h incubation period (see Materials and Methods section). The results show that the BEAT CD20/CD3(SP34) antibody was highly potent at redirecting T cell killing against Daudi cells with an EC₅₀ of 25 pM (mean of 3 donors).

[0375] Another example of BEAT antibodies targeting both human CD20 antigen and human CD3 epsilon using the chimeric rituximab antibody VH and VL sequences is formatted as follows: a BEAT EGFR/CD3 is engineered using a combination of antigen binding sites described in Example 2.1 and 2.5 for the anti-human CD3 epsilon and the anti-human CD20 antigen binding sites, respectively.

[0376] The anti-human CD20 arm of the hetero-dimeric immunoglobulin consists of a BEAT heavy chain (SEQ ID NO: 341) encompassing a variable heavy chain region, a CH1 γ1 region, a γ1 hinge region, a γ3 CH2 region with L234A and L235A substitutions (EU numbering), and a γ3 based BEAT CH3 domain assembled with its cognate light chain (SEQ ID NO: 181). This heavy chain has no binding to Protein A as it encompasses part of a human IgG3 Fc region and has its heavy chain variable domain originating from a non-VH3 domain subclass.

[0377] The anti-human CD3 epsilon arm of the hetero-dimeric immunoglobulin consists of a BEAT heavy chain (SEQ ID NO: 311) encompassing a scFv fragment, a CH1 γ1 region, a γ1 hinge region, a γ1 CH2 region with L234A and L235A substitutions (EU numbering), and a γ1 based BEAT CH3 domain. This bispecific antibody is referred herein as BEAT CD20/CD3(SP34-Kappa2) antibody.

### Examples of EGFR/CD3 Targeting BEAT Antibodies

[0378] An example of BEAT antibodies targeting both human EGFR antigen and human CD3 epsilon using the mouse Erbitux antibody VH and VL sequences is formatted as follows: a BEAT EGFR/CD3 is engineered using a combination of antigen binding sites described in Example 2.1 and 2.6 for the anti-human CD3 epsilon and the anti-human EGFR antigen binding sites, respectively. The anti-human EGFR arm of the hetero-dimeric immunoglobulin consists of a BEAT heavy chain (SEQ ID NO: 342) encompassing a variable heavy chain region, a CH1 γ1 region, a γ1 hinge region, a γ3 CH2 region with L234A and L235A substitutions (EU numbering), and a γ3 based BEAT CH3 domain assembled with its cognate light chain (SEQ ID NO: 175). This heavy chain has no binding to Protein A as it encompasses part of a human IgG3 Fc region and has its heavy chain variable domain originating from a non-VH3 domain subclass.

[0379] The anti-human CD3 epsilon arm of the hetero-dimeric immunoglobulin consists of a BEAT heavy chain (SEQ ID NO: 311) encompassing a scFv fragment, a CH1 γ1 region, a γ1 hinge region, a γ1 CH2 region with L234A and L235A substitutions (EU numbering), and a γ1 based BEAT CH3 domain. This bispecific antibody is referred herein as BEAT EGFRcetux/CD3(SP34-Kappa2) antibody.

[0380] Another example of BEAT antibodies targeting both human EGFR antigen and human CD3 epsilon using the human Vectibix antibody VH and VL sequences is formatted as follows: a BEAT EGFR/CD3 is engineered using a combination of antigen binding sites described in Example 2.1 and 2.6 for the anti-human CD3 epsilon and the anti-human EGFR antigen binding sites, respectively. The anti-human EGFR arm of the hetero-dimeric immunoglobulin consists of a BEAT heavy chain (SEQ ID NO: 343) encompassing a variable heavy chain region, a CH1 γ1 region, a γ1 hinge region, a γ3 CH2 region with L234A and L235A substitutions (EU numbering), and a γ3 based BEAT CH3 domain assembled with its cognate light chain (SEQ ID NO: 344). This heavy chain has no binding to Protein A as it encompasses part of a human IgG3 Fc region and has its heavy chain variable domain originating from a non-VH3 domain subclass. The anti-human CD3 epsilon arm of the hetero-dimeric immunoglobulin consists of a BEAT heavy chain (SEQ ID NO: 311) encompassing a scFv fragment, a CH1 γ1 region, a γ1 hinge region, a γ1 CH2 region with L234A and L235A substitutions (EU numbering), and a γ1 based BEAT CH3 domain. This bispecific antibody is referred herein as BEAT EGFRpani/CD3(SP34-Kappa2) antibody.

### Examples of IgE/CD3 Targeting BEAT Antibodies

[0381] An example of BEAT antibodies targeting both human IgE antigen and human CD3 epsilon using the humanized omalizumab antibody VH and VL sequences is formatted as follows: a BEAT IgE/CD3 is engineered using a combination of antigen binding sites described in Example 2.1 and 2.8 for the anti-human CD3 epsilon and the anti-human IgE antigen binding sites, respectively. The anti-human IgE arm of the hetero-dimeric immunoglobulin consists of a BEAT heavy chain (SEQ ID NO: 345) encompassing a variable heavy chain region, a CH1 γ1 region, a γ1 hinge region, a γ3 CH2 region with L234A and L235A substitutions (EU numbering), and a γ3 based BEAT CH3 domain assembled with its cognate light chain (SEQ ID NO: 346). This heavy chain has no binding to Protein A as it encompasses part of a human IgG3 Fc region and has its heavy chain variable domain originating from a non-VH3 domain subclass. The anti-human CD3 epsilon arm of the hetero-dimeric immunoglobulin consists of a BEAT heavy chain (SEQ ID NO: 311) encompassing a scFv fragment, a CH1 γ1 region, a γ1 hinge region, a γ1 CH2 region with L234A and L235A substitutions (EU numbering), and a γ1 based BEAT CH3 domain. This bispecific antibody is referred herein as BEAT IgEomali/CD3(SP34-Kappa2) antibody.

[0382] Another example of BEAT antibodies targeting both human IgE antigen and human CD3 epsilon using the mouse Bsw17 antibody VH and VL sequences is formatted as follows: a BEAT IgE/CD3 is engineered using a combination of antigen binding sites described in Example 2.1 and 2.8 for the anti-human CD3 epsilon and the anti-human IgE antigen binding sites, respectively. The anti-human IgE arm of the hetero-dimeric immunoglobulin consists of a BEAT heavy chain (SEQ ID NO: 347) encompassing a variable heavy chain region, a CH1 γ1 region, a γ1 hinge region, a γ3 CH2 region with L234A and L235A substitutions (EU numbering), and a γ3 based BEAT CH3 domain assembled with its cognate light chain (SEQ ID NO: 348). This heavy chain has no binding to Protein A as it encompasses part of a human IgG3 Fc region and has its heavy chain variable domain originating from a non-VH3 domain subclass. The anti-human CD3 epsilon arm of the hetero-dimeric immunoglobulin consists of a BEAT heavy chain (SEQ ID NO: 311) encompassing a scFv fragment, a CH1 γ1 region, a γ1 hinge region, a γ1 CH2 region with L234A and L235A substitutions (EU numbering), and a γ1 based BEAT CH3 domain. This bispecific antibody is referred herein as BEAT IgEbsw17/CD3(SP34-Kappa2) antibody.

[0383] Membrane IgE expressing cell lines described are used to assess redirected T cell killing in assays similar to that of described above.

Sequence listing

| | |
|---|---|
| SEQ ID NO: 1 - Fc 133 | DKTHTCPPCPAPELLGGPSVFLFPPKPKDTLMISRTPEVTCVV |
| | VDVSHEDPEVQFKWYVDGVEVHNAKTKPREEQYNSTFRVVS |
| | VLTVLHQDWLNGKEYKCKVSNKALPAPIEKTISKTKGQPREP |
| | QVYTLPPSREEMTKNQVSLTCLVKGFYPSDIAVEWESSGQPE |
| | NNYNTTPPMLDSDGSFFLYSKLTVDKSRWQQGNIFSCSVMHE |
| | ALHNRFTQKSLSLSPGK |
| SEQ ID NO: 2 - anti- | EVQLVESGGGLVQPGGSLRLSCAASGFNIKDTYIHWVRQAPG |
| HER2 FAB-Fc 133 | KGLEWVARIYPTNGYTRYADSVKGRFTISADTSKNTAYLQM |
| heavy chain | NSLRAEDTAVYYCSRWGGDGFYAMDYWGQGTLVTVSSAST |
| | KGPSVFPLAPSSKSTSGGTAALGCLVKDYFPEPVTVSWNSGA |
| | LTSGVHTFPAVLQSSGLYSLSSVVTVPSSSLGTQTYICNVNHK |
| | PSNTKVDKKVEPKSCDKTHTCPPCPAPELLGGPSVFLFPPKPK |
| | DTLMISRTPEVTCVVVDVSHEDPEVQFKWYVDGVEVHNAKT |
| | KPREEQYNSTFRVVSVLTVLHQDWLNGKEYKCKVSNKALPA |
| | PIEKTISKTKGQPREPQVYTLPPSREEMTKNQVSLTCLVKGFY |
| | PSDIAVEWESSGQPENNYNTTPPMLDSDGSFFLYSKLTVDKSR |
| | WQQGNIFSCSVMHEALHNRFTQKSLSLSPGK |
| SEQ ID NO: 3 - anti- | DIQMTQSPSSLSASVGDRIVTITCRASQDVNTAVAWYQQKPGK |
| HER2 light chain | APKLLIYSASFLYSGVPSRFSGSRSGTDFTLTISSLQPEDFATYY |
| | CQQHYTTPPTFGQGTKVEIKRTVAAPSVFIFPPSDEQLKSGTAS |
| | VVCLLNNFYPREAKVQWKVDNALQSGNSQESVTEQDSKDST |
| | YSLSSTLTLSKADYEKHKVYACEVTHQGLSSPVTKSFNRGEC |
| SEQ ID NO: 4- anti- | EVQLVESGGGLVQPGGSLRLSCAASGFNIKDTYIHWVRQAPG |
| HER2 scFv-Fc 133 | KGLEWVARIYPTNGYTRYADSVKGRFTISADTSKNTAYLQM |
| | NSLRAEDTAVYYCSRWGGDGFYAMDYWGQGTLVTVSSGGG |
| | GSGGGGSGGGGSDIQMTQSPSSLSASVGDRVTITCRASQDVN |
| | TAVAWYQQKPGKAPKLLIYSASFLYSTVPSRFSGSRSGTDFTL |
| | TISSLQPEDFATYYCQQHYTTPPTFGQGTKVEIKRGGGGTDKT |
| | HTCPPCPAPELLGGPSVFLFPPKPKDTLMISRTPEVTCVVVDVS |
| | HEDPEVQFKWYVDGVEVHNAKTKPREEQYNSTFRVVSVLTV |
| | LHQDWLNGKEYKCKVSNKALPAPIEKTISKTKGQPREPQVYT |
| | LPPSREEMTKNQVSLTCLVKGFYPSDIAVEWESSGQPENNYN |
| | TTPPMLDSDGSFFLYSKLTVDKSRWQQGNIFSCSVMHEALHN |
| | RFTQKSLSLSPGK |
| SEQ ID NO: 5 - anti- | EVQLVESGGGLVQPGGSLRLSCAASGFNIKDTYIHWVRQAPG |
| HER2 FAB heavy chain | KGLEWVARIYPTNGYTRYADSVKGRFTISADTSKNTAYLQM |
| | NSLRAEDTAVYYCSRWGGDGFYAMDYWGQGTLVTVSSAST |
| | KGPSVFPLAPSSKSTSGGTAALGCLVKDYFPEPVTVSWNSGA |
| | LTSGVHTFPAVLQSSGLYSLSSVVTVPSSSLGTQTYICNVNHK |
| | PSNTKVDKKVEPKSC |
| SEQ ID NO: 6- anti- | EVQLVESGGGLVQPGGSLRLSCAASGFNIKDTYIHWVRQAPG |
| HER2 FAB G65S heavy | KGLEWVARIYPTNGYTRYADSVKSRFTISADTSKNTAYLQMN |
| chain | SLRAEDTAVYYCSRWGGDGFYAMDYWGQGTLVTVSSASTK |
| | GPSVFPLAPSSKSTSGGTAALGCLVKDYFPEPVTVSWNSGALT |
| | SGVHTFPAVLQSSGLYSLSSVVTVPSSSLGTQTYICNVNHKPS |
| | NTKVDKKVEPKSC |
| SEQ ID NO: 7 - anti- | EVQLVESGGGLVQPGGSLRLSCAASGFNIKDTYIHWVRQAPG |
| HER2 FAR R66Q heavy | KGLEWVARIYPTNGYTRYADSVKGQFTISADTSKNTAYLQM |
| chain | NSLRAEDTAVYYCSRWGGDGFYAMDYWGQGTLVTVSSAST |
| | KGPSVFPLAPSSKSTSGGTAALGCLVKDYFPEPVTVSWNSGA |
| | LTSGVHTFPAVLQSSGLYSLSSVVTVPSSSLGTQTYICNVNHK |
| | PSNTKVDKKVEPKSC |
| SEQ ID NO: 8 - anti- | EVQLVESGGGLVQPGGSLRLSCAASGFNIKDTYIHWVRQAPG |
| HER2 FAB T68V heavy | KGLEWVARIYPTNGYTRYADSVKGRFVISADTSKNTAYLQM |
| chain | NSLRAEDTAVYYCSRWGGDGFYAMDYWGQGTLVTVSSAST |
| | KGPSVFPLAPSSKSTSGGTAALGCLVKDYFPEPVTVSWNSGA |
| | LTSGVHTFPAVLQSSGLYSLSSVVTVPSSSLGTQTYICNVNHK |
| | PSNTKVDKKVEPKSC |
| SEQ ID NO: 9 - anti- | EVQLVESGGGLVQPGGSLRLSCAASGFNIKDTYIHWVRQAPG |
| HER2 FAB Q81E heavy | KGLEWVARIYPTNGYTRYADSVKGRIFTISADTSKNTAYLEM |
| chain | NSLRAEDTAVYYCSRWGGDGFYAMDYWGQGTLVTVSSAST |
| | KGPSVFPLAPSSKSTSGGTAALGCLVKDYFPEPVTVSWNSGA |
| | LTSGVHTFPAVLQSSGLYSLSSVVTVPSSSLGTQTYICNVNHK |
| | PSNTKVDKKVEPKSC |
| SEQ ID NO: 10 - anti- | EVQLVESGGGLVQPGGSLRLSCAASGFNIKDTYIHWVRQAPG |
| HER2 FAB N82aS | KGLEWVARIYPTNGYTRYADSVKGRFTISADTSKNTAYLQMS |
| heavy chain | SLRAEDTAVYYCSRWGGDGFYAMDYWGQGTLVTVSSASTK |
| | GPSVFPLAPSSKSTSGGTAALGCLVKDYFPEPVTVSWNSGALT |
| | SGVHTFPAVLQSSGLYSLSSVVTVPSSSLGTQTYICNVNHKPS |
| | NTKVDKKVEPKSC |
| SEQ ID NO: 11 - anti- | EVQLVESGGGLVQPGGSLGLSCAASGFNIKDTYIHWVRQAPG |
| HER2 FAB | KGLEWVARIYPTNGYARAADSVKGRFTISADTSKNTAYLQM |
| R19G/T57A/Y59A | NSLRAEDTAVYYCSRWGGDGFYAMDYWGQGTLVTVSSAST |
| heavy chain. | KGPSVFPLAPSSKSTSGGTAALGCLVKDYFPEPVTVSWNSGA |
| | LTSGVHTFPAVLQSSGLYSLSSVVTVPSSSLGTQTYICNVNHK |
| | PSNTKVDKKVEPKSC |
| SEQ ID NO: 12 - anti- | EVQLVESGGGLVQPGGSLRLSCAASGFNIKDTYIHWVRQAPG |
| HER2 FAB T57A heavy | KGLEWVARIYPTNGYARYADSVKGRFTISADTSKNTAYLQM |
| chain. | NSLRAEDTAVYYCSRWGGDGFYAMDYWGQGTLVTVSSAST |
| | KGPSVFPLAPSSKSTSGGTAALGCLVKDYFPEPVTVSWNSGA |
| | LTSGVHTFPAVLQSSGLYSLSSVVTVPSSSLGTQTYICNVNHK |
| | PSNTKVDKKVEPKSC |
| SEQ ID NO: 13 - anti- | EVQLVESGGGLVQPGGSLRLSCAASGFNIKDTIYIHWVRQAPG |
| HER2 FAB T57E heavy | KGLEWVARIYPTNGYERYADSVKGRFTISADTSKNTAYLQM |
| chain | NSLRAEDTAVYYCSRWGGDGFYAMDYWGQGTLVTVSSAST |
| | KGPSVFPLAPSSKSTSGGTAALGCLVKDYFPEPVTVSWNSGA |
| | LTSGVHTFPAVLQSSGLYSLSSVVTVPSSSLGTQTYICNVNHK |
| | PSNTKNDKKVEPKSC |
| SEQ ID NO: 14 - anti- | EVQLVESGGGLVQPGGSLRLSCAASGFNIKDTYIHWVRQAPG |
| HER2 scFv(G65S)-Fc | KGLEWVARIYPTNGYTRYADSVKSRFTISADTSKNTAYLQMN |
| 133 heavy chain | SLRAEDTAVYYCSRWGGDGFYAMDYWGQGTLVTVSSGGGG |
| | SGGGGSGGGGSDIQMTQSPSSLSASVGDRVTITCRASQDVNT |
| | AVAWYQQKPGKAPKLLIYSASFLYSTVPSRFSGSRSGTDFTLT |
| | ISSLQPEDFATYYCQQHYTTPPTFGQGTKVEIKRGGGGTDKTH |
| | TCPPCPAPELLGGPSVFLFPPKPKDTLMISRTPEVTCVVVDVSH |
| | EDPEVQFKWYVDGVEVHNAKTKPREEQYNSTFRVVSVLTVL |
| | HQDWLNGKEYKCKVSNKALPAPIEKTISKTKGQPREPQVYTL |
| | PPSREEMTKNQVSLTCLVKGFYPSDIAVEWESSGQPENNYNT |
| | TPPMLDSDGSFFLYSKLTVDKSRWQQGNIFSCSVMHEALHNR |
| | FTQKSLSLSPGK |
| SEQ ID NO: 15 - anti- | EVQLVESGGGLVQPGGSLRLSCAASGFNIKDTYIHWVRQAPG |
| HER2 scFv(N82aS)-Fc | KGLEWVARIYPTNGYTRYADSVKGRFTISADTSKNTAYLQMS |
| 133 heavy chain | SLRAEDTAVYYCSRWGGDGFYAMDYWGQGTLVTVSSGGGG |
| | SGGGGSGGGGSDIQMTQSPSSLSASVGDRVTITCRASQDVNT |
| | AVAWYQQKPGKAPKLLIYSASFLYSTVPSRFSGSRSGTDFTLT |
| | ISSLQPEDFATYYCQQHYTTPPTFGQGTKVEIKRGGGGTDKTH |
| | TCPPCPAPELLGGPSVFLFPPKPKDTLMISRTPEVTCVVVDVSH |
| | EDPEVQFKWYVDGVEVHNAKTKPREEQYNSTFRVVSVLTVL |
| | HQDWLNGKEYKCKVSNKALPAPIEKTISKTKGQPREPQVYTL |
| | PPSREEMTKNQVSLTCLVKGFYPSDIAVEWESSGQPENNYNT |
| | TPPMLDSDGSFFLYSKLTVDKSRWQQGNIFSCSVMHEALHNR |
| | FTQKSLSLSPGK |
| SEQ ID NO: 16 - anti- | EVQLVESGGGLVQPGGSLRLSCAASGFNIKDTYIHWVRQAPG |
| HER2 FA B(G65S)-Fc | KGLEWVARIYPTNGYTRYADSVKSRFTISADTSKNTAYLQMN |
| 133 heavy chain | SLRAEDTAVYYCSRWGGDGFYAMDYWGQGTLVTVSSASTK |
| | GPSVFPLAPSSKSTSGGTAALGCLVKDYFPEPVTVSWNSGALT |
| | SGVHTFPAVLQSSGLYSLSSVVTVPSSSLGTQTYICNVNHKPS |
| | NTKVDKKVEPKSCDKTHTCPPCPAPELLGGPSVFLFPPKPKDT |
| | LMISRTPEVTCVVVDVSHEDPEVQFKWYVDGVEVHNAKTKP |
| | REEQYNSTFRVVSVLTVLHQDWLNGKEYKCKVSNKALPAPIE |
| | KTISKTKGQPREPQVYTLPPSREEMTKNQVSLTCLVKGFYPSD |
| | IAVEWESSGQPENNYNTTPPMLDSDGSFFLYSKLTVDKSRWQ |
| | QGNIFSCSVMHEALHNRFTQKSLSLSPGK |
| SEQ ID NO: 17 - anti- | EVQLVESGGGLVQPGGSLRLSCAASGFNIKDTYIHWVRQAPG |
| HER2 FAB(N82aS)-Fc | KGLEWVARIYPTNGYTRYADSVKGRFTISADTSKNTAYLQMS |
| 133 heavy chain | SLRAEDTAVYYCSRWGGDGFYAMDYWGQGTLVTVSSASTK |
| | GPSVFPLAPSSKSTSGGTAALGCLVKDYFPEPVTVSWNSGALT |
| | SGVHTFPAVLQSSGLYSLSSVVTVPSSSLGTQTYICNVNHKPS |
| | NTKVDKKVEPKSCDKTHTCPPCPAPELLGGPSVFLFPPKPKDT |
| | LMISRTPEVTCVVVDVSHEDPEVQFKWYVDGVEVHNAKTKP |
| | REEQYNSTFRVVSVLTVLHQDWLNGKEYKCKVSNKALPAPIE |
| | KTISKTKGQPREPQVYTLPPSREEMTKNQVSLTCLVKGFYPSD |
| | IAVEWESSGQPENNYNTTPPMLDSDGSFFLYSKLTVDKSRWQ |
| | QGNIFSCSVMHEALHNRFTQKSLSLSPGK |
| SEQ ID NO: 18 - OKT3 | QVQLQQSGAELARPGASVKMSCKASGYTFTRYTMHWVKQR |
| heavy chain variable | PGQGLEWIGYINPSRGYTNYNQKFKDKATLTTDKSSSTAYMQ |
| domain | LSSLTSEDSAVYYCARYYDDHYCLDYWGQGTTLTVSS |
| SEQ ID NO: 19 - OKT3 | QIVLTQSPAIMSASPGEKVTMTCSASSSVSYMNWYQQKSGTS |
| light chain variable | PKRWIYDTSKLASGVPAHFRGSGSGTSYSLTISGMEAEDAAT |
| domain | YYCQQWSSNPFTFGSGTKLEIN |
| SEQ ID NO: 20 - | EVQLVESGGGLVQPGGSLRLSCAASGFNIKDTYIHWVRQAPG |
| Herceptin heavy chain | KGLEWVARIYPTNGYTRYADSVKGRFTISADTSKNTAYLQM |
| variable domain | NSLRAEDTAVYYCSRWGGDGFYAMDYWGQGTLVTVSS |
| SEQ ID NO: 21 - | DIQMTQSPSSLSASVGDRVTITCRASQDVNTAVAWYQQKPGK |
| Herceptin light chain | APKLLIYSASFLYSGVPSRFSGSRSGTDFTLTISSLQPEDFATYY |
| variable domain | CQQHYTTPPTFGQGTKVEIK |
| SEQ ID NO: 22 - | EVQLVESGGGLVQPGGSLRLSCAASGFTFSSYAMSWVRQAP |
| Human germlime heavy | GKGLEWVSAISG~~SGGSTYYADSVKGRFTISRDNSKNTLYL |
| chain variable domain | QMNSLRAEDTAVYYCAK |
| IGHV3-23*04 | |
| SEQ ID NO: 23 - | DIQMTQSPSSLSASVGDRVTITCRASQSISSYLNWYQQKPGKA |
| Human germline light | PKLLIYAASSLQSGVPSRFSGSGSGTDFTLTISSLQPEDFATYY |
| chain variable domain | CQQSYSTP |
| IGKV1-39*01 | |
| SEQ ID NO: 24 - | EIVLTQSPGTLSLSPGERATLSCRASQSVSSSYLAWYQQKPGQ |
| Human germline light | APRLLIYGASSRATGIPDRFSGSGSGTDFTLTISRLEPEDFAVY |
| chain variable domain | YCQQYGSSP |
| IGKV3-20*01 | |
| SEQ ID NO: 25 - | QVQLQQSGAELARPGASVKMSCKASGYTFTRYTMHWVKQR |
| Chimeric OKT3 heavy | PGQGLEWIGYINPSRGYTNYNQKFKDKATLTTDKSSSTAYMQ |
| chain IgG1 | LSSLTSEDSAVYYCARYYDDHYCLDYWGQGTTLTVSSASTK |
| | GPSVFPLAPSSKSTSGGTAALGCLVKDYFPEPVTVSWNSGALT |
| | SGVHTFPAVLQSSGLYSLSSVVTVPSSSLGTQTYICNVNHKPS |
| | NTKNDKKVEPKSCDKTHTCPPCPAPELLGGPSVFLFPPKPKDT |
| | LMISRTPEVTCVVVDVSHEDPEVKFNWYVDGVEVHNAKTKP |
| | REEQYNSTYRVVSVLTVLHQDWLNGKEYKCKVSNKALPAPI |
| | EKTISKAKGQPREPQVYTLPPSRDELTKNQVSLTCLVKGFYPS |
| | DIAVEWESNGQPENNYKTTPPVLDSDGSFFLYSKLTVDKSRW |
| | QQGNVFSCSVMHEALHNHYTQKSLSLSPGK |
| SEQ ID NO: 26 - | QIVLTQSPAIMSASPGEKVTMTCSASSSVSYMNWYQQKSGTS |
| Chimeric OKT3 human | PKRWIYDTSKLASGVPAHFRGSGSGTSYSLTISGMEAEDAAT |
| kappa tight chain | YYCQQWSSNPFTFGSGTKLEINRTVAAPSVFIFPPSDEQLKSGT |
| | ASVVCLLNNFYPREAKVQWKVDNALQSGNSQESVTEQDSKD |
| | STYSLSSTLTLSKADYEKHKVYACEVTHQGLSSPVTKSFNRG |
| | EC |
| SEQ ID NO: 27 - OKT3 | EVQLVESGGGLVQPGGSLRLSCAASGYTFTRYTIHWVRQAPG |
| humanized heavy chain | KGLEWVAYINPSRGYTRYADSVKGRFTISADTSKNTAYLQM |
| with VH domain | NSLRAEDTAVYYCARYYDDHYCLDYWGQGTLVTVSSASTK |
| | GPSVFPLAPSSKSTSGGTAALGCLVKDYFPEPVTVSWNSGALT |
| | SGVHTFPAVLQSSGLYSLSSVVTVPSSSLGTQTYICNVNHKPS |
| | NTKVDKKVEPKSCDKTHTCPPCPAPELIGGPSVFLFPPKPKDT |
| | LMISRTPEVTCVVVDVSHEDPEVKFNWYVDGVEVHNAKTKP |
| | REEQYNSTYRVVSVLTVLHQDWLNGKEYKCKVSNKALPAPI |
| | EKTISKAKGQPREPQVYTLPPSRDELTKNQVSLTCLVKGFYPS |
| | DIAVEWESNGQPENNYKTTPPVLDSDGSFFLYSKLTVDKSRW |
| | QQGNVFSCSVMHEALHNHYTQKSLSLSPGK |
| SEQ ID NO: 28 - OKT3 | EVQLVESGGGLVQPGGSLRLSCAASGYFTRYTIHWVRQAPG |
| humanized heavy chain | KGLEWVGYINPSRGYTRYADSVKGRFTISADTSKNTAYLQM |
| with VH1 domain | NSLRAEDTAVYYCARYYDDHYCLDYWGQGTLVTVSSASTK |
| | GPSVFPLAPSSKSTSGGTAALGCLVKDYFPEPVTVSWNSGALT |
| | SGVHTFPAVLQSSGLYSLSSVVTVPSSSLGTQTYICNVNHKPS |
| | NTKVDKKVEPKSCDKTHTCPPCPAPELLGGPSVFLFPPKPKDT |
| | LMISRTPEVTCVVVDVSHEDPEVKFNWYVDGVEVHNAKTKP |
| | REEQYNSTYRVVSVLTVLHQDWLNGKEYKCKVSNKALPAPI |
| | EKTISKAKGQPREPQVYTLPPSRDELTKNQVSLTCLVKGFYPS |
| | DIAVEWESNGQPENNYKTTPPVLDSDGSFFLYSKLTVDKSRW |
| | QQGNVFSCSVMHEALHNHYTQKSLSLSPGK |
| SEQ ID NO: 29 - OKT3 | EVQLVESGGGLVQPGGSLRLSCAASGYTFTRYTMHWVRQAP |
| humanized heavy chain | GKGLEWVGYINPSRGYTRYADSVKGRFTISADTSKNTAYLQ |
| with VH2 domain | MNSLRAEDTAVYYCARYYDDHYCLDYWGQGTLVTVSSAST |
| | KGPSVFPLAPSSKSTSGGTAALGCLVKDYFPEPVTVSWNSGA |
| | LTSGVHTFPAVLQSSGLYSLSSVVTVPSSSLGTQTYICNVNHK |
| | PSNTKVDKKVEPKSCDKTHTCPPCPAPELLGGPSVFLFPPKPK |
| | DTLMISRTPEVTCVVVDVSHEDPEVKFNWYVDGVEVHNAKT |
| | KPREEQYNSTYRVVSVLTVLHQDWLNGKEYKCKVSNKALPA |
| | PIEKTISKAKGQPREPQVYTLPPSRDELTKNQVSLTCLVKGFY |
| | PSDIAVEWESNGQPENNYKTTPPVLDSDGSFFLYSKLTVDKSR |
| | WQQGNVFSCSVMHEALHNHYTQKSLSLSPGK |
| SEQ ID NO: 30 - OKT3 | EVQLVESGGGLVQPGGSLRLSCAASGYTFTRYTIHWVRQAPG |
| humanized heavy chain | KGLEWVGYINPSRGYTRYADSVKGRFTISTDTSKNTAYLQMN |
| with VH3 domain | SLRAEDTAVYYCARYYDDHYCLDYWGQGTLVTVSSASTKGP |
| | SVFPLAPSSKSTSGGTAALGCLVKDYFPEPVTVSWNSGALTSG |
| | VHTFPAVLQSSGLYSLSSVVTVPSSSLGTQTYICNVNHKPSNT |
| | KVDKKVEPKSCDKTHTCPPCPAPELLGGPSVFLFPPKPKDTLM |
| | ISRTPEVTCVVVDVSHEDPEVKFNWYVDGVEVHNAKTKPRE |
| | EQYNSTYRVVSVLTVLHQDWLNGKEYKCKVSNKALPAPIEK |
| | TISKAKGQPREPQVYTLPPSRDELTKNQVSLTCLVKGFYPSDI |
| | AVEWESNGQPENNYKTTPPVLDSDGSFFLYSKLTVDKSRWQ |
| | QGNVFSCSVMHEALHNHVFQKSLSLSPGK |
| SEQ ID NO: 31 - OKT3 | EVQLVESGGGLVQPGGSLRLSCAASGYTFTRYTMHWVRQAP |
| humanized heavy chain | GKGLEWVGYINPSRGYTRYADSVKGRFTISTDTSKNTAYLQM |
| with VH4 domain | NSLRAEDTAVYYCARYYDDHYCLDYWGQGTLVTVSSASTK |
| | GPSVFPLAPSSKSTSGGTAALGCLVKDYFPEPVTVSWNSGALT |
| | SGVHTFPAVLQSSGLYSLSSVVTVPSSSLGTQTYICNVNHKPS |
| | NTKVDKKVEPKSCDKTHTCPPCPAPELLGGPSVFLFPPKPKDT |
| | LMISRTPEVCVVVDVSHEDPEVKFNWYVDGVEVHNAKTKP |
| | REEQYNSTYRVVSVLTVLHQDWLNGKEYKCKVSNKALPAPI |
| | EKTISKAKGQPREPQVYTLPPSRDELTKNQVSLTCLVKGFYPS |
| | DIAVEWESNGQPENNYKTTPPVLDSDGSFFLYSKLTVDKSRW |
| | QQGNVFSCSVMHEALHNHYTQKSLSLSPGK |
| SEQ ID NO: 32 - OKT3 | EVQLVESGGGLVQPGGSLRLSCAASGYTFTRYTMHWVRQAP |
| humanized heavy chain | GKGLEWVGYINPSRGYTRYADSVKGRFTLSTDKSKNTAYLQ |
| with VH5 domain | MNSLRAEDTAVYYCARYYDDHYCLDYWGQGTLVTVSSAST |
| | KGPSVFPLAPSSKSTSGGTAALGCLVKDYFPEPVTVSWNSGA |
| | LTSGVHTFPAVLQSSGLYSLSSVVTVPSSSLGTQTYICNVNHK |
| | PSNTKVDKKVEPKSCDKTHTCPPCPAPELLGGPSVFLFPPKPK |
| | DTLMISRTPEVTCVVVDVSHEDPEVKFNWYVDGVEVHNAKT |
| | KPREEQYNSTYRVVSVLTVLHQDWLNGKEYKCKVSNKALPA |
| | PIEKTISKAKGQPREPQVYTLPPSRDELTKNQVSLTCLVKGFY |
| | PSDIAVEWESNGQPENNYKTTPPVLDSDGSFFLYSKLTVDKSR |
| | WQQGNVFSCSVMHEALHNHYTQKSLSLSPGK |
| SEQ ID NO: 33 - OKT3 | EVQLVESGGGLVQPGGSLRLSCAASGYTFTRYTMHWVRQAP |
| humanized heavy chain | GKGLEWIGYINPSRGYTRYADSVKGRFTLSTDKSKNTAYLQM |
| with VH6 domain | NSLRAEDTAVYYCARYYDDHYCLDYWGQGTLVTVSSASTK |
| | GPSVFPLAPSSKSTSGGTAALGCLVKDYFPEPVTVSWNSGALT |
| | SGVHTFPAVLQSSGLYSLSSVVTVPSSSLGTQTYICNVNHKPS |
| | NTKVDKKVEPKSCDKTHTCPPCPAPELLGGPSVFLFPPKPKDT |
| | LMISRTPEVTCYVVDVSHEDPEVKFNWYVDGVEVHNAKTKP |
| | REEQYNSTYRVVSVLTVLHQDWLNGKEYKCKVSNKALPAPI |
| | EKTISKAKGQPREPQVYTLPPSRDELTKNQVSLTCLVKGFYPS |
| | DIAVEWESNGQPENNYKTTPPVLDSDGSFFLYSKLTVDKSRW |
| | QQGNVFSCSVMHEALHNHYTQKSLSLSPGK |
| SEQ ID NO: 34 - OKT3 | EVQLVESGGGLVQPGGSLRLSCAASGYTFTRYTMHWVRQAP |
| humanized heavy chain | GKGLEWVGYINPSRGYTNYADSVKGRFTLSTDKSKNTAYLQ |
| with VH7 domain | MNSLRAEDTAVYYCARYYDDHYCLDYWGQGTLVTVSSAST |
| | KGPSVFPLAPSSKSTSGGTAALGCLVKDYFPEPVTVSWNSGA |
| | LTSGVHTFPAVLQSSGLYSLSSVVTVPSSSLGTQTYICNVNHK |
| | PSNTKVDKKVEPKSCDKTHTCPPCPAPELLGGPSVFLFPPKPK |
| | DTILMISRTPEVTCVVVDVSHEDPEVKFNWYVDGVEVHNAKT |
| | KPREEQYNSTYRVVSVLTVLHQDWLNGKEYKCKVSNKALPA |
| | PIEKTISKAKGQPREPQVYTLPPSRDELTKNQVSLTCLVKGFY |
| | PSDIAVEWESNGQPENNYKTTPPVLDSDGSFFLYSKLTVDKSR |
| | WQQGNVFSCSVMHEALHNHYTQKSLSLSPGK |
| SEQ ID NO: 35 - OKT3 | EVQLVESGGGLVQPGGSLRLSCAASGYTFTRYTMHWVRQAP |
| humanized heavy chain | GKGLEWIGYINPSRGYTYYADSVKGRFTLSTDKSKNTAYLQ |
| with VH8 domain | MNSLRAEDTAVYYCARYYDDHYCLDYWGQGTLVTVSSAST |
| | KGPSVFPLAPSSKSTSGGTAALGCLVKDYFPEPVTVSWNSGA |
| | LTSGVHTFPAVLQSSGLYSLSSVVTVPSSSLGTQTYICNVNHK |
| | PSNTKVDKKVEPKSCDKTHTCPPCPAPELLGGPSVFLFPPKPK |
| | DTLMISRTPEVTCVVVDVSHEDPEVKFNWYVDGVEVHNAKT |
| | KPREEQYNSTYRVVSVLTVLHQDWLNGKEYKCKVSNKALPA |
| | PIEKTISKAKGQPREPQVYTLPPSRDELTKNQVSLTCLVKGFY |
| | PSDIAVEWESNGQPENNYKTTPPVLDSDGSFFLYSKLTVDKSR |
| | WQQGNVFSCSVMHEALHNHNYTQKSLSLLSPGK |
| SEQ ID NO: 36 - OKT3 | EVQLVESGGGLVQPGGSLRLSCAASGYTFTRYTMHWVRQAP |
| humanized heavy chain | GKGLEWIGYINPSRGYTYYADSVKSRFTLSTDKSKNTAYLQM |
| with VH9 domain | NSLRAEDTAVYYCARYYDDHYCLDYWGQGTLVTVSSASTK |
| | GPSVFPLAPSSKSTSGGTAALGCLVKDYFPEPVTVSWNSGALT |
| | SGVHTFPAVLQSSGLYSLSSVVTVPSSSLGTQTYICNVNHKPS |
| | NTKVDKKVEPKSCDKTHTCPPCPAPELLGGPSVFLFPPKPKDT |
| | LMISRTPEVTCVVVDVSHEDPEVKFNWYVDGVEVHNAKTKP |
| | REEQYNSTYRVVSVLTVLHQDWLNGKEYKCKVSNKALPAPI |
| | EKTISKAKGQPREPQVYTLPPSRDELTKNQVSLTCLVKGFYPS |
| | DIAVEWESNGQPENNYKTTPPVLDSDGSFFLYSKLTVDKSRW |
| | QQGNVFSCSVMHEALHNHYTQKSLSLSPGK |
| SEQ ID NO: 37 - OKT3 | EVQLVESGGGLVQPGGSLRLSCAASGYTFTRYTMHWVRQAP |
| humanized heavy chain | GKGLEWIGYINPSRGYTYYADSVKSRATLSTDKSKNTAYLQ |
| with VH10 domain | MNSLRAEDTAVYYCARYYDDHYCLDYWGQGTLVTVSSAST |
| | KGPSVFPLAPSSKSTSGGTAALGCLVKDYFPEPVTVSWNSGA |
| | LTSGVHTEPAVLQSSGLYSLSSVVTVPSSSLGTQTYICNVNHK |
| | PSNTKVDKKVEPKSCDKTHTCPPCPAPELLGGPSVFLFPPKPK |
| | DTLMISRTPEVTCVVVDVSHEDPEVKFNWYVDGVEVHNAKT |
| | KPREEQYNSTYRVVSVLTVLHQDWLNGKEYKCKVSNKALPA |
| | PIEKTISKAKGQPREPQVYTLPPSRDELTKNQVSLTCLVKGFY |
| | PSDIAVEWESNGQPENNYKTTPPVLDSDGSFFLYSKLTVDKSR |
| | WQQGNVFSCSVMHEALHNHYTQKSLSLSPGK |
| SEQ ID NO: 38 - OKT3 | EVQLVESGGGLVQPGGSLRLSCAASGYTFTRYTMHWVRQAP |
| humanized heavy chain | GKGLEWIGYINPSRGYTYYADSVKGRFTLSTDKSKNTAYLQ |
| with VH11 domain | MSSLRAEDTAVYYCARYYDDHYCLDYWGQGTLVTVSSAST |
| | KGPSVFPLAPSSKSTSGGTAALGCLVKDYFPEPVTVSWNSGA |
| | LTSGVHTFPAVLQSSGLYSLSSVVTVPSSSLGTQTYICNVNHK |
| | PSNTKVDKKVEPKSCDKTHTCPPCPAPELLGGPSVFLFPPKPK |
| | DTLMISRTPEVTCVVVDVSHEDPEVKFNWYVDGVEVHNAKT |
| | KPREEQYNSTYRVVSVLTVLHQDWLNGKEYKCKVSNKALPA |
| | PIEKTISKAKGQPREPQVYTLPPSRDELTKNQVSLTCLVKGFY |
| | PSDIAVEWESNGQPENNYKTTPPVLDSDGSFFLYSKLTVDKSR |
| | WQQGNVFSCSVMHEALHNHYTQKSLSLSPGK |
| SEQ ID NO: 39 - OKT3 | DIQMTQSPSSLSASVGDRVTITCRASSSVSYVAWYQQKPGKA |
| humanized light chain | PKLLIYDTSKLYSGVPSRFSGSRSGTDFTLTISSLQPEDFATYY |
| with VL domain | CQQWSSNPPTFGQGTKVEIKRTVAAPSVFIFPPSDEQLKSGTA |
| | SVVCLLNNFYPREAKVQWKVDNALQSGNSQESVTEQDSKDS |
| | TYSLSSTLTLSKADYEKHKVYACEVTHQGLSSPVTKSFNRGE |
| | C |
| SEQ ID NO: 40 - OKT3 | DIQMTQSPSSLSASVGDRVTITCRASSSVSYVAWYQQKPGKA |
| humanized light chain | PKLLIYDTSKLYSGVPSRFSGSRSGTDYTLTISSLQPEDFATYY |
| with VL1 domain | CQQWSSNPPTFGQGTKVEIKRTVAAPSVFIFPPSDEQLKSGTA |
| | SVVCLLNNFYPREAKVQWKVDNALQSGNSQESVTEQDSKDS |
| | TYSLSSTLTLSKADYEKHKVYACEVTHQGLSSPVTKSFNRGE |
| | C |
| SEQ ID NO: 41 - OKT3 | DIQLTQSPSSLSASVGDRVTITCRASSSVSYVAWYQQKPGKAP |
| humanized light chain | KLLIYDTSKLYSGVPSRFSGSRSGTDFTLTISSLQPEDFATYYC |
| with VL2 domain | QQWSSNPPTFGQGTKVEIKRTVAAPSVFIFPPSDEQLKSGTAS |
| | VVCLLNNFYPREAKVQWKVDNALQSGNSQESVTEQDSKDST |
| | YSLSSTLTLSKADYEKHKVYACEVTHQGLSSPVTKSFNRGEC |
| SEQ ID NO: 42 - OKT3 | DIQLTQSPSSLSASVGDRVTITCRASSSVSYVAWYQQKPGKAP |
| humanized light chain | KLLIYDTSKLYSGVPSRFSGSRSGTDYTLTISSLQPEDFATYYC |
| with VL3 domain | QQWSSNPPTFGQGTKVEIKRTVAAPSVFIFPPSDEQLKSGTAS |
| | VVCLLNNFYPREAKVQWKVDNALQSGNSQESVTEQDSKDST |
| | YSLSSTLTSKADYEKHKVYACEVTHQGLSSPVTKSFNRGEC |
| SEQ ID NO: 43 - OKT3 | DIQLTQSPSSLSASVGDRVTITCRASSSVSYVAWYQQKPGKAP |
| humanized light chain | KRWIYDTSKLYSGVPSRFSGSRSGTDYTLTISSLQPEDFATYY |
| with VL4 domain | CQQWSSNPPTFGQGTKVEIKRTVAAPSVFIFPPSDEQLKSGTA |
| | SVVCLLNNFYPREAKVQWKVDNALQSGNSQESVTEQDSKDS |
| | TYSLSSTLTLSKADYEKHKVYACEVTHQGLSSPVTKSFNRGE |
| | C |
| SEQ ID NO: 44 - OKT3 | DIQLTQSPSSLSASVGDRVTITCRASSSVSYMNWYQQKPGKA |
| humanized light chain | PKLLIYDTSKLYSGVPSRFSGSRSGTDYTLTISSLQPEDFATYY |
| with VL5 domain | CQQWSSNPPTFGQGTKVEIKRTVAAPSVFIFPPSDEQLKSGTA |
| | SVVCLLNNFYPREAKVQWKVDNALQSGNSQESVTEQDSKDS |
| | TYSLSSTLTLSKADYEKHKVYACEVTHQGLSSPVTKSFNRGE |
| | C |
| SEQ ID NO: 45 - OKT3 | DIQLTQSPSSLSASVGDRVTITCRASSSVSYVAWYQQKPGKAP |
| humanized light chain | KRWIYDTSKLYSGVPSRFSGSRSGTDYTLTISSLQPEDFATYY |
| with VL6 domain | CQQWSSNPFTFGQGTKVEIKRTVAAPSVFIFPPSDEQLKSGTA |
| | SVVCLLNNFYPREAKVQWKVDNALQSGNSQESVTEQDSKDS |
| | TYSLSSTLTLSKADYEKHKVYACEVTHQGLSSPVTKSFNRGE |
| | C |
| SEQ ID NO: 46 - OKT3 | DIQLTQSPSSLSASVGDRVTITCRASSSVSYMNWYQQKPGKA |
| humanized light chain | PKLLIYDTSKLYSGVPSRFSGSRSGTDYTLTISSLQPEDFATYY |
| with VL7 domain | CQQWSSNPFTFGQGTKVEIKRTVAAPSVFIFPPSDEQLKSGTA |
| | SVVCLLNNFYPREAKVQWKVDNALQSGNSQESVTEQDSKDS |
| | TYSLSSTLTLSKADYEKHKVYACEVTHQGLSSPVTKSENRGE |
| | C |
| SEQ ID NO: 47 - OKT3 | DIQLTQSPSSLSASVGDRVTITCRASSSVSYVAWYQQKPGKAP |
| humanized light chain | KRWIYDTSKLYSGVPSRFSGSGSGTDYTLTISSLQPEDFATYY |
| with VL8 domain | CQQWSSNPPTFGQGTKVEIKRTVAAPSVFIFPPSDEQLKSGTA |
| | SVVCLLNNFYPREAKVQWKVDNALQSGNSQESVTEQDSKDS |
| | TYSLSSTLTLSKADYEKHKVYACEVTHQGLSSPVTKSFNRGE |
| | C |
| SEQ ID NO: 48 - OKT3 | EVQLVESGGGLVQPGGSLRLSCAASGYTFTRYTMHWVRQAP |
| humanized VH8 domain | GKGLEWIGYINPSRGYTYYADSVKGRFTLSTDKSKNTAYLQ |
| | MNSLRAEDTAVYYCARYDDHYCLDYWGQGTLVTVSS |
| SEQ ID NO: 49 - OKT3 | EVQLVESGGGLVQPGGSERLSCAASGYTFTRYTMHWVRQAP |
| humanized VH11 | GKGLEWIGYINPSRGYTYYADSVKGRFTLSTDKSKNTAYLQ |
| domain | MSSLRAEDTAVYYCARYYDDHYCLDYWGQGTLVTVSS |
| SEQ ID NO: 50 - OKT3 | DIQLTQSPSSLSASVGDRVTITCRASSSVSYVAWYQQKPGKAP |
| humanized VIA domain | KRWIYDTSKLYSGVPSRFSGSRSGTDYTLTISSLQPEDFATYY |
| | CQQWSSNPPTFGQGTKVEIK |
| SEQ ID NO: 51 - OKT3 | DIQLTQSPSSLSASVGDRVTITCRASSSVSYVAWYQQKPGKAP |
| humanized VL8 domain | KRWIYDTSKLYSGVPSRFSGSGSGTDYTLTISSLQPEDFATYY |
| | CQQWSSNPPTFGQGTKVEIK |
| SEQ ID NO: 52 - scFv | QVQLQQSGAELARPGASVKMSCKASGYTFTRYTMHWVKQR |
| fragment mouse OKT3 - | PGQGLEWIGYINPSRGYTNYNQKFKDKATLTTDKSSSTAYMQ |
| human IgG1 Fc fusion | LSSLTSEDSAVYYCARYYDDHYCLDYWGQGTTLTVSSGGGG |
| | SGGGGSGGGGSQIVLTQSPAIMSASPGEKVTMTCSASSSVSY |
| | MNWYQQKSGTSPKRWIYDTSKLASGVPAHFRGSGSGTSYSL |
| | TISGMEAEDAATYYCQQWSSNPFTFGSGTKLEINGGGGTDKT |
| | HTCPPCPAPELLGGPSVFLFPPKPKDTLMISRTPEVTCVVVDVS |
| | HEDPEVKFNWYVDGVEVHNAKTKPREEQYNSTYRVVSVLTV |
| | LHQDWLNGKEYKCKVSNKALPAPIEKTISKAKGQPREPQVYT |
| | LPPSRDELTKNQVSLTCLVKGFYPSDIAVEWESNGQPENNYK |
| | TTPPVLDSDGSFFLYSKLTVDKSRWQQGNVFSCSVMHEALHN |
| | HYTQKSLSLSPGK |
| SEQ ID NO: 53 - scFv | EVQLVESGGGLVQPGGSLRLSCAASGYTFTRYTMHWVRQAP |
| fragment humanized | GKGLEWVGYINPSRGYTRYADSVKGRFTLSTDKSKNTAYLQ |
| OKT3 VH5-VL3 - | MNSLRAEDTAVYYCARYYDDHYCLDYWGQGTLVTVSSGGG |
| human IgG1 Fc fusion | GSGGGGSGGGGSGGGASDIQLTQSPSSLSASVGDRVTITCRAS |
| | SSVSYVAWYQQKPGKAPKLLIYDTSKLYSGVPSRFSGSRSGT |
| | DYTLTISSLQPEDFATYYCQQWSSNPPTFGQGTKVEIKGGGGT |
| | DKTHTCPPCPAPELLGGPSVFLFPPKPKDTLMISRTPEVTCVV |
| | VDVSHEDPEVKFNWYVDGVEVHNAKTKPREEQYNSTYRVV |
| | SVLTVLHQDWLNGKEYKCKVSNKALPAPIEKTISKAKGQPRE |
| | PQVYTLPPSRDELTKNQVSLTCLVKGFYPSDIAVEWESNGQPE |
| | NNYKTTPPVLDSDGSFFLYSKLTVDKSRWQQGNVFSCSVMH |
| | EALHNHYTQKSLSLSPGK |
| SEQ ID NO: 54 - scFv | EVQLVESGGGLVQPGGSLRLSCAASGYTFTRYTMHWVRQAP |
| fragment humanized | GKGLEWIGYINPSRGYTRYADSVKGRFTLSTDKSKNTAYLQM |
| OKT3 -VH6-VL4 - | NSLRAEDTAVYYCARYYDDHYCLDYWGQGTLVTVSSGGGG |
| human IgG1 Fc fusion | SGGGGSGGGGSGGGASDIQLTQSPSSLSASVGDRVTITCRASS |
| | SVSYVAWYQQKPGKAPKRWIYDTSKLYSGVPSRFSGSRSGTD |
| | YTLTISSLQPEDFATYYCQQWSSNPPTFGQGTKVEIKGGGGTD |
| | KTHTCPPCPAPELLGGPSVFLFPPKPKDTLMISRTPEVTCVVV |
| | DVSHEDPEVKFNWYVDGVEVHNAKTKPREEQYNSTYRVVS |
| | VLTVLHQDWLNGKEYKCKVSNKALPAPIEKTISKAKGQPREP |
| | QVYTLPPSRDELTKNQVSLTCLVKGFYPSDIAVEWESNGQPE |
| | NNYKTTPPVLDSDGSFFLYSKLTVDKSRWQQGNVFSCSVMH |
| | EALHNHYTQKSLSLSPGK |
| SEQ ID NO: 55 - scFv | EVQLVESGGGLVQPGGSLRLSCAASGYTFTRYTMHWVRQAP |
| fragment humanized | GKGLEWIGYINPSRGYTRYADSVKGRFTLSTDKSKNTAYLQM |
| OKT3 -VH16-VL5 - | NSLRAEDTAVYYCARYYDDHYCLDYWGQGTLVTVSSGGGG |
| human IgG1 Fc fusion | SGGGGSGGGGSGGGASDIQLTQSPSSLSASVGDRVTITCRASS |
| | SVSYMNWYQQKPGKAPKLLIYDTSKLYSGVPSRFSGSRSGTD |
| | YTLTISSLQPEDFATYYCOQWSSNPPTFGQGTKVEIKGGGGTD |
| | KTHTCPPCPAPELLGGPSVFLFPPKPKDTLMISRTPEVTCVVV |
| | DVSHEDPEVKFNWYVDGVEVHNAKTKPREEQYNSTYRVVS |
| | VLTVLHQDWLNGKEYKCKVSNKALPAPIEKTISKAKGQPREP |
| | QVYTLPPSRDELTKNQVSLTCLVKGFYPSDIAVEWESNGQPE |
| | NNYKTTPPVLDSDGSFFLYSKLTVDKSRWQQGNVFSCSVMH |
| | EALHNHYTQKSLSLSPGK |
| SEQ ID NO: 56 - scFv | EVQLVESGGGLVQPGGSLRLSCAASGYTFTRYTMHWVRQAP |
| fragment humanized | GKGLEWIGYINPSRGYTYYADSVKGRFTLSTDKSKNTAYLQ |
| OKT3 VH8-VL4 - | MNSLRAEDTAVYYCARYYDDHYCLDYWGQGTLVTVSSGGG |
| human IgG1 Fc fusion | GSGGGGSGGGGSGGGASDIQLTQSPSSLSASVGDRVTITCRAS |
| | SSVSYVAWYQQKPGKAPKRWIYDTSKLYSGVPSRFSGSRSGT |
| | DYTLTISSLQPEDFATYYCQQWSSNPPTFGQGTKVEIKggggtdkt |
| | htcppcpapellggpsvflfppkpkdtlmisrtpevtcvvvdvshedpevkfnwyvdgvev |
| | hnaktkpreeqynstyrvvsvltvlhqdwlngkeykckvsnkalpapiektiskakgqprep |
| | qvytlppsrdeltknqvsltclvkgfypsdiavewesngqpennykttppvldsdgsfflysklt |
| | vdksrwqqgnvfscsvmhealhnhytqkslslspgk |
| SEQ ID NO: 57 - scFv | EVQLVESGGGLVQPGGSLRLSCAASGYTFTRYTMHWVRQAP |
| fragment humanized | GKGLEWIGYINPSRGYTYYADSVKGRFTLSTDKSKNTAYLQ |
| OKT3 VH8-VL8 - | MNSLRAEDTAVYYCARYYDDHYCLDYWGQGTLVTVSSGGG |
| human IgG1 Fc fusion | GSGGGGSGGGGSGGGASDIQLTQSPSSLSASVGDRVTITCRAS |
| | SSVSYVAWYQQKPCKAPKRWIYDTSKLYSGVPSRFSGSGSGT |
| | DYTLTISSLQPEDFATYYCQQWSSNPPTFGQGTKVEIKggggtdkt |
| | htcppcpapellggpsvflfppkpkdtlmisrtpevtcvvvdvshedpevkfnwyvdgvev |
| | hnaktkpreeqynstryvsvltvlhqdwlngkeykckvsnkalpapiektiskakgqprep |
| | qvytlppsrdeltknqvsltclvkgfypsdiavewesngqpennykttppvldsdgsfflysklt |
| | vdksrwqqgnvfscsvmhealhnhytqkslslspgk |
| SEQ ID NO: 58 - scFv | EVQLVESGGGLVQPGGSLRLSCAASGYTFTRYTMHWVRQAP |
| fragment humanized | GKGLEWIGYINPSRGYTYYADSVKGRFTLSTDKSKNTAYLQ |
| OKT3 VH8-VL4 | MNSLRAEDTAVYYCARYYDDHYCLDYWGQGTLVTVSSGGG |
| | GSGGGGSGGGGSGGGASDIQLTQSPSSLSASVGDRVTITCRAS |
| | SSVSYVAWYQQKPGKAPKRWIYDTSKLYSGVPSRFSGSRSGT |
| | DYTLTISSLQPEDFATYYCQQWSSNPPTFGQGTKVEIK |
| SEQ ID NO: 59 - scFv | EVQLVESGGGLVQPGGSLRLSCAASGYTFTRYTMHWVRQAP |
| fragment humanized | GKGLEWIGYINPSRGYTYYADSVKGRFTISTDKSKNTAYLQ |
| OKT3 VH8-VL8 | MNSLRAEDTAVYYCARYYDDHYCLDYWGQGTLVTVSSGGG |
| | GSGGGGSGGGGSGGGASDIQLTQSPSSLSASVGDRVTITCRAS |
| | SSVSYVAWYQQKPGKAPKRWIYDTSKLYSGVPSRFSGSGSGT |
| | DYTLTISSLQPEDFATYYCQQWSSNPPTFGQGTKVEIK |
| SEQ ID NO: 60 - Mouse | EVQLVESGGGLVQPKGSLKLSCAASGFTFNTYAMNWVRQAP |
| anti-human CD3 epsilon | GKGLEWVARIRSKYNNYATYYADSVKDRFTISRDDSQSILYL |
| SP34 VH domain | QMNNLKTEDTAMYYCVRHGNFGNSYVSWFAYWGQGTLVT |
| | VSA |
| SEQ ID NO: 61 - Mouse | QAVVTQESALTTSPGETVTLTCRSS~TGAVTTSNYANWVQEK |
| anti-human CD3 epsilon | PDHLFTGLIGGTNKRAPGVPARFSGSLIGDKAALTITGAQTED |
| SP34 VL domain | EAIYCALWYSNLWVFGGGTKLTVL |
| SEQ ID NO: 62 - | EVQLVESGGGLVQPKGSLKLSCAASGFTFNTYAMNWVRQAP |
| Chimeric SP34 heavy | GKGLEWVARIRSKYNNYATYYADSVKDRFTISRDDSQSILYL |
| chain IgG1 | QMNNLKTEDTAMYYCVRHGNFGNSYVSWFAYWGQGTLVT |
| | VSAASTKGPSVFPLAPSSKSTSGGTAALGCLVKDYFREPVTVS |
| | WNSGALTSGVHTFPAVLQSSGLYSLSSVVTVPSSSLGTQTYIC |
| | NVNHKPSNTKVDKKVEPKSCDKTHTCPPCPAPELLGGPSVFL |
| | FPPKPKDTLMISRTPEVTCVVVDVSHEDPEVKFNWYVDGVEV |
| | HNAKTKPREEQYNSTYRVVSVLTVLHQDWLNGKEYKCKVS |
| | NKALPAPIEKTISKAKGQPREPQVYTLPPSRDELTKNQVSLTC |
| | LVKGFYPSDIAVEWESNGQPENNYKTTPPVLDSDGSFFLYSKL |
| | TVDKSRWQQGNVFSCSVMHEALHNHYTQKSLSLSPGK |
| SEQ ID NO: 63 - | QAVVTQESA~LTTSPGETVTLTCRSSTGAVTTSNYANWVQEK |
| Chimeric SP34 light | PDHLFTGLIGGTNKRAPGVPARFSGSLIGDKAALTITGAQTED |
| chain (mouse V lambda - | EAIYFCALWYSNLWVFGGGTKLTVLRTVAAPSVFIFPPSDEQL |
| human lambda | KSGTASVVCLLNNFYPREAKVQWKVDNALQSGNSQESVTEQ |
| constant domain) | DSKDSTYSLSSTLTLSKADYEKHKVYACEVTHQGLSSPVTKS |
| | FNRGEC |
| SEQ ID NO: 64 - SP34 | EVQLVESGGGLVQPGGSLRLSCAASGFTFNTYAMNWVRQAP |
| humanized heavy chain | GKGLEWVARIRSKYNNYATYYADSVKGRFTISRDDSKNTLY |
| with VH1 domain | LQMNSLRAEDTAVYYCVRHGNFGNSYVSWFAYWGQGTTVT |
| | VSSASTKGPSVFPLAPSSKSTSGGTAALGCLVKDYFPEPVTVS |
| | WNSGALTSGVHTFPAVLQSSGLYSLSSVVTVPSSSLGTQTYIC |
| | NVNHKPSNTKVDKKVEPKSCDKTHTCPPCPAPELLGGPSVFL |
| | FPPKPKDTLMISRTPEVTCVVVDVSHEDPEVKFNWYVDGVEV |
| | HNAKTKPREEQYTNSTYRVVSVLTVLHQDWLNGKEYKCKVS |
| | NKALPAPIEKTISKAKGQPREPQVYTLPPSRDELTKNQVSLTC |
| | LVKGFYPSDIAVEWESNGQPENNYKTTPPVLDSDGSFFLYSKL |
| | TVDKSRWQQGNVFSCSVMHEALHNHYTQKSLSLSPGK |
| SEQ ID NO: 65 - SP34 | EVQLVESGGGLVQPGGSLRLSCAASGFTFNTYAMNWVRQAP |
| humanized heavy chain | GKGLEWVARIRSKYNNYATYYADSVKSRFTISRDDSKNTLYL |
| with VH2 domain | QMNSLRAEDTAVYYCVRHGNFGNSYVSWFAYWGQGTTVTV |
| | SSASTKGPSVFPLAPSSKSTSGGTAALGCLVKDYFPEPVTVSW |
| | NSGALTSGVHTFPAVLQSSGLYSLSSVVTVPSSSLGTQTYICN |
| | VNHKPSNTKVDKKVEPKSCDKTHTCPPCPAPELLGGPSVFLFP |
| | PKPKDTLMISRTPEVTCVVVDVSHEDPEVKFNWYVDGVEVH |
| | NAKTKPREEQYNSTYRVVSVLTVLHQDWLNGKEYKCKVSN |
| | KALPAPIEKTISKAKGQPREPQVYTLPPSRDELTKNQVSLTCL |
| | VKGFYPSDIAVEWESNGQPENNYKTTPPVLDSDGSTFFLYSKLT |
| | VDKSRWQQGNVFSCSVMHEALHNHYTQKSLSLSPGK |
| SEQ ID NO: 66 - SP34 | EVQLVESGGGLVQPGGSLRLSCAASGFTFNTYAMNWVRQAP |
| humanized heavy chain | GKGLEWVARIRSKYNNYATYYADSVKSRFTISRDDSKNTLYL |
| with VH3 domain | QMNSLRAEDTAVYYCVRHGNFGNSYVSYFAYWGQGTTVTV |
| | SSASTKGPSVFPLAPSSKSTSGGTAALGCLVKDYFPEPVTVSW |
| | NSGALTSGVHTFPAVLQSSGLYSLSSVVTVPSSSLGTQTYICN |
| | VNHKPSNTKVDKKVEPKSCDKTHTCPPCPAPELLGGPSVFLFP |
| | PKPKDTLMISRTPEVTCVVVDVSHEDPEVKFNWYVDGVEVH |
| | NAKTKPREEQYTNSTYRVVSVLTVLHQDWLNGKEYKCKVSN |
| | KALPAPIEKTISKAKGQPREPQVYTLPPSRDELTKNQVSLTCL |
| | VKGFYPSDIAVEWESNGQPENNYKTTPPVLDSDGSFFLYSKLT |
| | VDKSRWQQGNVFSCSVMHEALHNHYTQKSLSTSPGK |
| SEQ ID NO: 67 - SP34 | EVQLVESGGGLVQPGGSLRLSCAASGFTFNTYAMNWVRQAP |
| humanized heavy chain | GKGLEWVARIRSKYNNYATYYADSVKSRFTISRDDSKNTLYL |
| with VH4 domain | QMNSLRAEDTAVYYCVRHGNFGNSYVSFFAYWGQGTTVTV |
| | SSASTKGPSVFPLAPSSKSTSGGTAALGCLVKDYFPEPVTVSW |
| | NSGALTSGVHTFPAVLQSSGLYSLSSVVTVPSSSLGTQTYICN |
| | VNHKPSNTKVDKKVEPKSCDKTHTCPPCPAPELLGGPSVFLFP |
| | PKPKDTLMISRTPEVTCVVVDVSHEDPEVKFNWYVDGVEVH |
| | NAKTKPREEQYNSTYRVVSVLTVLHQDWLNGKEYKCKVSN |
| | KALPAPIEKTISKAKGQPREPQVYTLPPSRDELTKNQVSLTCL |
| | VKGFYPSDIAVEWESNGQPENNYKTTPPVLDSDGSFFLYSKLT |
| | VDKSRWQQGNVFSCSVMHEALHNHYTQKSLSLSPGK |
| SEQ ID NO: 68 - SP34 | EVQLVESGGGLVQPGGSLRLSCAASGFTFNTYAMNWVRQAP |
| humanized heavy chain | GKGLEWVARIRSKYNNYATYYADSVKGRFTISRDDSKNTLY |
| with VH5 domain | LQMNSLRAEDTAVYYCVRHGNFGNSYVSYFAYWGQGTTVT |
| | VSSASTKGPSVFPLAPSSKSTSGGTAALGCLVKDYFPEPVTVS |
| | WNSGALTSGVHTFPAVLQSSGLYSLSSVVTVPSSSLGTQTYIC |
| | NVNHKPSNTKVDKKVEPKSCDKTHTCPPCPAPELLGGPSVFL |
| | FPPKPKDTLMISRTPEVTCVVVDVSHEDPEVKFNWYYDGVEV |
| | HNAKTKPREEQYNSTYRVVSVLTVLHQDWLNGKEYKCKVS |
| | NKALPAPIEKTISKAKGQPREPQVYTLPPSRDELTKNQVSLTC |
| | LVKGFYPSDIAVEWESNGQPENNYKTTPPVLDSDGSFFLYSKL |
| | TVDKSRWQQGNVFSCSVMHEALHNHYTQKSLSLSPGK |
| SEQ ID NO: 69 - SP34 | EAVVTQSPATLSVSPGERATLSCRSSTGAVTTSNYANWVQEK |
| humanized light chain | PGQAFRGLIGGANKRAPGVPARFSGSLSGDEATLTISSLQSED |
| with VL1 domain | FAVYFCQLWYSNLWVFGQGTKLEIKRTVAAPSVFIFPPSDEQL |
| | KSGTASVVCLLNNFYPREAKVQWKVDNALQSGNSQESVTEQ |
| | DSKDSTYSLSSTLTLSKADYEKHKVYACEVTHQGLSSPVTKS |
| | FNRGEC |
| SEQ ID NO: 70 - SP34 | EAVVTQSPATLSVSPGERATLSCRSSTGAVTTSNYANWVQEK |
| humanized light chain | PGQAFRGLIGGANKRAPGVPARFSGSLSGDEATLTISSLQSED |
| with VL2 domain | FAVYFCALWYSNLWVFGQGTKLEIKRTVAAPSVFIFPPSDEQL |
| | KSGTASVVCLLNNFYPREAKVQWKVDNALQSGNSQESVTEQ |
| | DSKDSTYSLSSLTLSKADYEKHKVYACEVTHQGLSSPVTKS |
| | FNRGEC |
| SEQ ID NO: 71 - SP34 | EAVVTQS~ATLSVSPGERATLSCRSSTGAVTTSNYANWVQEK |
| humanized light chain | PGQAFRGLIGGANKRAPGVPARFSGSLSGDEATLTISSLQSED |
| with VL3 domain | FAVYFCQLWYSNLWVFGQGTKLEIKRTVAAPSVFIFPPSDEQL |
| | KSGTASVVCLLNNFYPREAKVQWKVDNALQSGNSQESVTEQ |
| | DSKDSTYSLSSTLTLSKADYEKHKVYACEVTHQGLSSPVTKS |
| | FNRGEC |
| SEQ ID NO: 72 - SP34 | EAVVTQS~ATLSVSPGERATLSCRSSTGAVTTSNYANWVQEK |
| humanized light chain | PGQAFRGLIGGANKRAPGVPARFSGSLSGDEATLTISSLQSED |
| with VL4 domain | FAVYFCALWYSNLWVFGQGTKLEIKRTVAAPSVFIFPPSDEQL |
| | KSGTASVVCLLNNFYPREAKVQWKVDNALQSGNSQESVTEQ |
| | DSKDSTYSLSSTLTLSKADYEKHKVYACEVTHQGLSSPVTKS |
| | FNRGEC |
| SEQ ID NO: 73 - SP34 | EIVVTQSPATLSVSPGERATLSCRSSTGAVTTSNYANWVQEKP |
| humanized light chain | GQAFRGLIGGANKRAPGVPARFSGSLSGDEATLTISSLQSEDF |
| with VL5 domain | AVYFCALWYSNLWVFGQGTKLEIKRTVAAPSVFIFPPSDEQL |
| | KSGTASVVCLLNNFYPREAKVQWKVDNALQSGNSQESVTEQ |
| | DSKDSTYSLSSTLTLSKADYEKHKVYACEVTHQGLSSPVTKS |
| | FNRGEC |
| SEQ ID NO: 74 - SP34 | EAVVTQSPATLSVSPGERATLSCRSSTGAVTTSNYANWVQEK |
| humanized light chain | PGQAPRGLIGGANKRAPGVPARFSGSLSGDEATLTISSLQSED |
| with VL6 domain | FAVYFCALWYSNLWVFGQGTKLEIKRTVAAPSVFIFPPSDEQL |
| | KSGTASVVCLLNNFYPREAKVQWKVDNALQSGNSQESVTEQ |
| | DSKDSTYSLSSTLTLSKADYEKHKVYACEVTHQGLSSPVTKS |
| | FNRGEC |
| SEQ ID NO: 75 - SP34 | EIVVTQSPATLSVSPGERATLSCRSSTGAVTTSNYANWVQEKP |
| humanized light chain | GQAPRGLIGGANKRAPGVPARFSGSLSGDEATLTISSLQSEDF |
| with VL7 domain | AVYFCALWYSNLWVFGQGTKLEIKRTVAAPSVFIFPPSDEQL |
| | KSGTASVVCLLNNFYPREAKVQWKVDNALQSGNSQESVTEQ |
| | DSKDSTYSLSSTLTLSKADYEKHKVYACEVTHQGLSSPVTKS |
| | FNRGEC |
| SEQ ID NO: 76 - SP34 | EAVVTQSPATLSVSPGERATLSCRSSTGAVTTSNYANWVQEK |
| humanized light chain | PGQAFRGLIGGANKRAPGVPARFSGSGSGDEATLTISSLQSED |
| with VL8 domain | FAVYFCALWYSNLWVFGQGTKLEIKRTVAAPSVFIFPPSDEQL |
| | KSGTASVVCLLNNFYPREAKVQWKVDNALQSGNSQESVTEQ |
| | DSKDSTYSLSSTLTLSKADYEKHKVYACEVTHQGLSSPVTKS |
| | FNRGEC |
| SEQ ID NO: 77 - SP34 | EIVVTQSPATLSVSPGERATLSCRSSTGAVTTSNYANWVQEKP |
| humanized light chain | GQAFRGLIGGANKRAPGVPARFSGSGSGDEATLTISSLQSEDF |
| with VL9 domain | AVYFCALWYSNLWVFGQGTKLEIKRTVAAPSVFIFPPSDEQL |
| | KSGTASVVCLLNNFYPREAKVQWKVDNALQSGNSQESVTEQ |
| | DSKDSTYSLSSTLTLSKADYEKHKVYACEVTHQGLSSPVTKS |
| | FNRGEC |
| SEQ ID NO: 78 - SP34 | EAVVTQSPATLSVSPGERATLSCRSSTGAVTTSNYANWVQEK |
| humanized light chain | PGQAFRGLIGGANKRAPGVPARFSGSLSGDEATLTISSLQSED |
| with VL10 domain | FAVYYCALWYSNLWVFGQGTKLEIKRTVAAPSVFIFPPSDEQ |
| | LKSGTASVVCLLNNFYPREAKVQWKVDNALQSGNSQESVTE |
| | QDSKDSTYSLSSTLTLSKADYEKHKVYACEVTHQGLSSPVTK |
| | SFNRGEC |
| SEQ ID NO: 79 - SP34 | EAVVTQSPATLSVSPGERATLSCRSSTGAVTTSNYANNWVQEK |
| humanized light chain | PGQAFRGLIGGANKRAPGVPARFSGSGSGTEATLTISSLQSED |
| with VL11 domain | FAVYFCALWYSNLWVFGQGTKLEIKRTVAAPSVFIFPPSDEQL |
| | KSGTASVVCLLNNFYPREAKVQWKVDNALQSGNSQESVTEQ |
| | DSKDSTYSLSSTLTLSKADYEKHKVYACEVTHQGLSSPVTKS |
| | FNRGEC |
| SEQ ID NO: 80 - SP34 | EAVVTQSPATLSVSPGERATLSCRSSTGAVTTSNYANWVQEK |
| humanized light chain | PGQAFRGLIGGANKRAPGVPARFSGSLSGTEATLTISSLQSEDF |
| with VL12 domain | AVYFCALWYSNLWVFGQGTKLEIKRTVAAPSVFIFPPSDEQL |
| | KSGTASVVCLLNNFYPREAKVQWKVDNALQSGNSQESVTEQ |
| | DSKDSTYSLSSTLTLSKADYEKHKVYACEVTHQGLSSPVTKS |
| | FNRGEC |
| SEQ ID NO: 81 - SP34 | EAVVTQSPATLSVSPGERATLSCRASTGAVTTSNYANWVQEK |
| humanized light chain | PGQAFRGLIGGANKRAPGVPARFSGSLSGDEATLTISSLQSED |
| with VL13 domain | FAVYFCALWYSNLWVFGQGTKLEIKRTVAAPSVFIFPPSDEQL |
| | KSGTASVVCLLNNFYPREAKVQWKVDNALQSGNSQESVTEQ |
| | DSKDSTYSLSSTLTLSKADYEKHKVYACEVTHQGLSSPVTKS |
| | FNRGEC |
| SEQ ID NO: 82 - SP34 | EAVVTQSPATLSVSPGERATLSCRSSTGAVTTSNYANWVQEK |
| humanized light chain | PGQAFRLLIGGANKRAPGVPARFSGSLSGDEATLTISSLQSEDF |
| with VL14 domain | AVYFCALWYSNLWVFGQGTKLEIKRTVAAPSVFIFPPSDEQL |
| | KSGTASVVCLLNNFYPREAKVQWKVDNALQSGNSQESVTEQ |
| | DSKDSTYSLSSTLTLSKADYEKHKVYACEVTHQGLSSPVTKS |
| | FNRGEC |
| SEQ ID NO: 83 - SP34 | EAVVTQSPATLSVSPGERATLSCRSSTGAVTTSNYANWVQQK |
| humanized light chain | PGQAFRGLIGGANKRAPGVPARFSGSLSGDEATLTISSLQSED |
| with VL15 domain | FAVYFCALWYSNLWVFGQGTKLEIKRTVAAPSVFIFPPSDEQL |
| | KSGTASVVCLLNNFYPREAKVQWKVDNALQSGNSQESVTEQ |
| | DSKDSTYSLSSTLTLSKADYEKHKVYACEVTHQGLSSPVTKS |
| | FNRGEC |
| SEQ ID NO: 84 - SP34 | EIVVTQSPATLSVSPGERATLSCRSSTGAVTTSNYANWVQEKP |
| humanized light chain | GQAFRGLIGGANKRAPGVPARFSGSLSGTEATLTISSLQSEDF |
| with VL16 domain | AVYFCALWYSNLWVFGQGTKLEIKRTVAAPSVFIFPPSDEQL |
| | KSGTASVVCLLNNFYPREAKVQWKVDNALQSGNSQESVTEQ |
| | DSKDSTYSLSSTLTLSKADYEKHKVYACEVTHQGLSSPVTKS |
| | FNRGEC |
| SEQ ID NO: 85 - SP34 | EIVVTQSPATLSVSPGERATLSCRASTGAVTTSNYANWVQEK |
| humanized tight chain | PGQAFRGLIGGANKRAPGVPARFSGSLSGDEATLTISSLQSED |
| with VL17 domain | FAVYFCALWYSNLWVFGQGTKLEIKRTVAAPSVFIFPPSDEQL |
| | KSGTASVVCLLNNFYPREAKVQWKVDNALQSGNSQESVTEQ |
| | DSKDSTYSLSSTLTLSKADYEKHKVYACEVTHQGLSSPVTKS |
| | FNRGEC |
| SEQ ID NO: 86 - SP34 | EIVVTQSPATLSVSPGERATLSCRSSTGAVTTSNYANWVQEKP |
| humanized light chain | GQAFRGLIGGANKRAPGVPARFSGSLSGDEATLTISSLQSEDF |
| with VL18 domain | AVYFCALWYSNLWVFGGGTKLEIKRTVAAPSVFIFPPSDEQL |
| | KSGTASVVCLLNNFYPREAKVQWKVDNALQSGNSQESVTEQ |
| | DSKDSTYSLSSTLTLSKADYEKHKVYACEVTHQGLSSPVTKS |
| | FNRGEC |
| SEQ ID NO: 87 - SP34 | EIVVTQSPATLSVSPGERATLSCRSSTGAVTTSNYANWVQEKP |
| humanized light chain | GQAFRGLIGGANKRAPGVPARFSGSLSGTEATLTISSLQSEDF |
| with VL19 domain | AVYYCALWYSNLWVFGQGTKLEIKRTVAAPSVFIFPPSDEQL |
| | KSGTASVVCLLNNFYPREAKVQWKVDNALQSGNSQLSVTEQ |
| | DSKDSTYSLSSTLTLSKADYEKHKVYACEVTHQGLSSPVTKS |
| | FNRGEC |
| SEQ ID NO: 88 - SP34 | EIVVTQSPATLSVSPGERATLSCRSSTGAVTTSNYANWVQQK |
| humanized light chain | PGQAFRGLIGGANKRAPGVPARFSGSLSGTEATLTISSLQSEDF |
| with VL20 domain | AVYYCALWYSNLWVFGQGTKLEIKRTVAAPSVFIFPPSDEQL |
| | KSGTASVVCLLNNFYPREAKVQWKVDNALQSGNSQESVTEQ |
| | DSKDSTYSLSSTLTLSKADYEKHKVYACEVTHQGLSSPVTKS |
| | FNRGEC |
| SEQ ID NO: 89 - SP34 | EIVVTQSPATLSVSPGERATLSCRSSTGAVTTSNYANWVQEKP |
| humanized light chain | GQAFRGLIGGANKRAPGVPARFSGSLSGDEATLTISSLQSEDF |
| with VL21 domain | AVYYCALWYSNLWVFGQGTKLEIKRTVAAPSVFIFPPSDEQL |
| | KSGTASVVCLLNNFYPREAKVQWKVDNALQSGNSQESVTEQ |
| | DSKDSTYSLSSTLTLSKADYEKHKVYACEVTHQGLSSPVTKS |
| | FNRGEC |
| SEQ ID NO: 90 - SP34 | EIVVTQSPATLSVSPGERATLSCRSSTGAVTTSNYANWVQQK |
| humanized light chain | PGQAFRGLIGGANKRAPGVPARFSGSLSGDEATLTISSLQSED |
| with VL22 domain | FAVYYCALWYSNLWVFGQGTKLEIKRTVAAPSVFIFPPSDEQ |
| | LKSGTASVVCLLNNFYPREAKVQWKVDNALQSGNSQESVTE |
| | QDSKDSTYSLSSTLTLSKADYEKHKVYACEVTHQGLSSPVTK |
| | SFNRGEC |
| SEQ ID NO: 91 - scFv | EVQLVESGGGLVQPGGSLRLSCAASGFTNTYAMNWVRQAP |
| fragment humanized | GKGLEWVARIRSKYNNYATYYADSVKSRFTISRDDSKNTLYL |
| SP34 VH2-VL21 - | QMNSLRAEDTAVYYCVRHGNFGNSYVSWFAYWGQGTTVTV |
| human IgG1 Fc fusion | SSGGGGSGGGGSGGGGSEIVVTQSPATLSVSPGERATLSCRSS |
| | TGAVTTSNYANWVQEKPGQAFRGLIGGANKRAPGVPARFSG |
| | SLSGDEATLTISSLQSEDFAVYYCALWYSNLWVFGQGTKLEI |
| | KGGGGTDKTHTCPPCPAPELLGGPSVFLFPPKPKDTLMISRTP |
| | EVTCVVVDVSHEDPEVKFNWYVDGVEVHNAKTKPREEQYN |
| | STYRVVSVLTVLHQDWLNGKEYKCKVSNKALPAPIEKTISKA |
| | KGQPREPQVYTLPPSRDELTKNQVSLTCLVKGFYPSDIAVEW |
| | ESNGQPENNYKTTPPVLDSDGSFFLYSKLTVDKSRWQQGNVF |
| | SCSVMHEALHNHYTQKSLSLSPGK |
| SEQ ID NO: 92 - scfv | EVQLVESGGGLVQPGGSLRLSCAASGFTFNTYAMNWVRQAP |
| fragment humanized | GKGLEWVARIRSKYNNYATYYADSVKSRFTISRDDSKNTLYL |
| SP34 VH3-VL23 - | QMNSLRAEDTAVYYCVRHGNFGNSYVSYFAYWGQGTTVTV |
| human IgG1 Fc fusion | SSGGGGSGGGGSGGGGSEIVVTQSPATLSVSPGERATLSCRSS |
| | TGAVTTSNYANWVQEKPGQAFRGLIGGANKRAPGVPARFSG |
| | SLSGDEATLTISSLQSEDFAVYYCALFYSNLWVFGQGTKLEIK |
| | GGGGTDKTHTCPPCPAPELLGGPSVFLFPPKPKDTLMISRTPE |
| | VTCVVVDVSHEDPEVKFNWYVDGVEVHNAKTKPREEQYNS |
| | TYRVVSVLTVLHQDWLNGKEYKCKVSNKALPAPIEKTISKAK |
| | GQPREPQVYTLPPSRDELTKNQVSLTCLVKGFYPSDIAVEWES |
| | NGQPENNYKTTPPVLDSDGSFFLYSKLTVDKSRWQQGNVFSC |
| | SVMHEALHNHYTQKSLSLSPGK |
| SEQ ID NO: 93 - scFv | EVQLVESGGGLVQPGGSLRLSCAASGFTFNTYAMNWVRQAP |
| fragment humanized | GKGLEWVARIRSKYNNYATYYADSVKSRFTISRDDSKNTLYL |
| SP34 VH4-VL23 - | QMNSLRAEDTAVYYCVRHGNFGNSYVSFFAYWGQGTTVTV |
| human IgG1 Fc fusion | SSGGGGSGGGGSGGGGSEIVVTQSPATLSVSPGERATLSCRSS |
| | TGAVTTSNYANWVQEKPGQAFRGLIGGANKRAPGVPARFSG |
| | SLSGDEATLISSLQSEDFAVYYCALFYSNLWVFGQGTKLEIK |
| | GGGGTDKTHTCPPCPAPELLGGPSVFLFPPKPKDTLMISRTPE |
| | VTCVVVDVSHEDPEVKFNWYVDGVEVHNAKTKPREEQYNS |
| | TYRVVSVLTVLHQDWLNGKEYKCKVSNKALPAPIEKTISKAK |
| | GQPREPQVYTLPPSRDELTKNQVSLTCLVKGFYPSDIAVEWES |
| | NGQPENNYKTTPPVLDSDGSFFLYSKLTVDKSRWQQGNVFSC |
| | SVMHEALHNHYTQKSLSLSPGK |
| SEQ ID NO: 94 - scFv | EVQLVESGGGLVQPGGSLRLSCAASGFTFNTYAMNWVRQAP |
| fragment humanized | GKGLEWVARIRSKYNNYATYYADSVKGRFTISRDDSKNTLY |
| SP34 VH5-VL23 - | LQMNSERAEDTAVYYCVRHGNFGNSYVSYFAYWGQGTTVT |
| human IgG1 Fc fusion | VSSGGGGSGGGGSGGGGSEIVVTQSPATLSVSPGERATLSCRS |
| | STGAVTTSNYANWVQEKPGQAFRGLIGGANKRAPGVPARFS |
| | GSLSGDEATLTISSLQSEDFAVYYCALFYSNLWVFGQGTKLEI |
| | KGGGGTDKTHTCPPCPAPELLGGPSVFLFPPKPKDTLMISRTP |
| | EVTCVVVDVSHEDPEVKFNWYVDGVEVHNAKTKPREEQYN |
| | STYRVVSVLTVLHQDWLNGKEYKCKVSNKALPAPIEKTISKA |
| | KGQPREPQVYTLPPSRDELTKNQVSLTCLVKGFYPSDIAVEW |
| | ESNGQPENNYKTTPPVLDSDGSFFLYSKLTVDKSRWQQGNVF |
| | SCSVMHEALHNHYTQKSLSLSPGK |
| SEQ ID NO: 95 - scFv | EVQLVESGGGLVQPGGSLRLSCAASGFTFNTYAMNWVRQAP |
| fragment humanized | GKGLEWVARIRSKYNNYATYYADSVKGRFTISRDDSKNTLY |
| SP34 VHI-VL27 - | LQMNSLRAEDTAVYYCVRHGNFGNSYVSWFAYWGQGTTVT |
| human IgG1 Fc fusion | VSSGGGGSGGGGSGGGGSEIVVTQSPATLSVSPGERATLSCRS |
| | STGAVTTSAAANWVQEKPGQAFRGLIGGANKRAPGVPARFS |
| | GSLSGDEATLTISSLQSEDFAVYYCALWYSNLWVFGQGTKLE |
| | IKGGGGTDKTHTCPPCPAPELLGGPSVFLFPPKPKDTLMISRTP |
| | EVTCVVVDVSHEDPEVKFNWYVDGVEVHNAKTKPREEQYN |
| | STYRVVSVLTVLHQDWLNGKEYKCKVSNKALPAPIEKTISKA |
| | KGQPREPQVYTLPPSRDELTKNQVSLTCLVKGFYPSDIAVEW |
| | ESNGQPENNYKTTPPVLDSDGSFFLYSKLTVDKSRWQQGNVF |
| | SCSVMHEALHNHYTQKSLSLSPGK |
| SEQ ID NO: 96 - scFv | EVQLVESGGGLVQPGGSLRLSCAASGFTFNTYAMNWVRQAP |
| fragment humanized | GKGLEWVARIRSKYNNYATYYADSVKGRFTISRDDSKNTLY |
| SP34 VH1-VL28 - | LQMNSLRAEDTAVYYCVRHGNFGNSYVSWFAYWGQGTTVT |
| human IgG1 Fc fusion | VSSGGGGSGGGGSGGGGSEIVVFQSPATLSVSPGERATLSCRS |
| | STGAVTTSNYANWVQEKPGQAFRGLIGGAAARAPGVPARFS |
| | GSLSGDEATLTISSLQSEDFAVYYCALWYSNLWVFGQGTKLE |
| | IKGGGGTDKTHTCPPCPAPELLGGPSVFLFPPKPKDTLMISRTP |
| | EVTCVVVDVSHEDPEVKFNWYVDGVEVHNAKTKPREEQYN |
| | STYRVVSVLTVLHQDWLNGKEYKCKVSNKALPAPIEKTISKA |
| | KGQPREPQVYTLPPSRDELTKNQVSLTCLVKGFYPSDIAVEW |
| | ESNGQPENNYKTTPPVLDSDGSFFLYSKLTVDKSRWQQGNVF |
| | SCSVMHEALHNHYTQKSLSLSPGK |
| SEQ ID NO: 97 - scFv | EVQLVESGGGLVQPGGSLRLSCAASGFTFNTYAMNWVRQAP |
| fragment humanized | GKGLEWVARIRSKYNNYATYYADSVKGRFTISRDDSKNTLY |
| SP34 VH1-VL29 - | LQMNSLRAEDTAVYYCVRHGNFGNSYVSWFAYWGQGTTVT |
| human IgG1 Fc fusion | VSSGGGGSGGGGSGGGGSEIVVTQSPATLSVSPGERATLSCRS |
| | STGAVTTSNYANWVQEKPGQAFRGLIGGANKAAAGVPARFS |
| | GSLSGDEATLTISSLQSEDFAVYYCALWYSNLWVFGQGTKLE |
| | IKGGGGTDKTHTCPPCPAPELLGGPSVFLFPPKPKDTLMISRTP |
| | EVTCVVVDVSHEDPEVKFNWYVDGVEVHNAKTKPREEQYN |
| | STYRVVSVLTVLHQDWLNGKEYKCKVSNKALPAPIEKTISKA |
| | KGQPREPQVYTLPPSRDELTKNQVSLTCLVKGFYPSDIAVEW |
| | ESNGQPENNYKTTPPVLDSDGSFFLYSKLTVDKSRWQQGNVF |
| | SCSVMHEALHNHYTQKSLSLSPGK |
| SEQ ID NO: 98 - scFv | EVQLVESGGGLVQPGGSLRLSCAASGFTFNTYAMNWVRQAP |
| fragment humanized | GKGLEWVARIRSKYNNYATYYADSVKGRFTISRDDSKNTLY |
| SP34 VH1-VL30 - | LQMNSLRAEDTAVYYCVRHGNFGNSYVSWFAYWGQGTTVT |
| human IgG1 Fc fusion | VSSGGGGSGGGGSGGGGSEIVVTQSPATLSVSPGERATLSCRS |
| | STGAVTTSNYANWVQEKPGQAFRGLIGGANKRAPGVPARFS |
| | GSLSGDEATLTISSLQSEDFAVYYCALWAANLWVFGQGTKLE |
| | IKGGGGTDKTHTCPPCPAPELLGGPSVFLFPPKPKDTLMISRTP |
| | EVTCVVVDVSHEDPEVKFNWYVDGVEVHNAKTKPREEQYN |
| | STYRVVSVLTVLHQDWLNGKEYKCKVSNKALPAPIEKTISKA |
| | KGQPREPQVYTLPPSRDELTKNQVSLTCLVKGFYPSDIAVEW |
| | ESNGQPENNYKTTPPVLDSDGSFFLYSKLTVDKSRWQQGNVF |
| | SCSVMHEALHNHYTQKSLSLSPGK |
| SEQ ID NO: 99 - scFv | EVQLVESGGGLVQPGGSLRLSCAASGFTFNTYAMNWVRQAP |
| fragment humanized | GKGLEWVARIRSKYNNYATYYADSVKGRFTISRDDSKNTLY |
| SP34 VH1-VL31 - | LQMNSLRAEDTAVYYCVRHGNFGNSYVSWFAYWGQGTTVT |
| human IgG1 Fc fusion | VSSGGGGSGGGGSGGGGSEIVVTQSPATLSVSPGERATLSCRS |
| | STGAVTTSNYANWVQEKPGQAFRGLIGGANKRAPGVPARFS |
| | GSLSGDEATLTISSLQSEDFAVYYCALWYSALWVFGQGTKLE |
| | IKGGGGTDKTHTCPPCPAPELLGGPSVFLFPPKPKDTLMISRTP |
| | EVTCVVVDVSHEDPEVKFNWYVDGVEVHNAKTKPREEQYN |
| | STYRVVSVLTVLHQDWLNGKEYKCKVSNKALPAPIEKTISKA |
| | KGQPREPQVYTLPPSRDELTKINQVSLTCLVKGFYPSDIAVEW |
| | ESNGQPENNYKTTPPVLDSDGSFFLYSKLTVDKSRWQQGNVF |
| | SCSVMHEALHNHYTQKSLSLSPGK |
| SEQ ID NO: 100 - scFv | EVQLVESGGGLVQPGGSLRLSCAASGFTFNTYAMNWVRQAP |
| fragment humanized | GKGLEWVARIRSKYNNYATYYADSVKGRFTISRDDSKNTLY |
| SP34 VH5-VL32 - | LQMNSLRAEDTAVYYCVRHGNFGNSYVSYFAYWGQGTTVT |
| human IgG1 Fc fusion | VSSGGGGSGGGGSGGGGSEIVVTQSPATLSVSPGERATLSCRS |
| | STGAVTAANYANWVQEKPGQAFRGLIGGANKRAPGVPARFS |
| | GSLSGDEATLTISSIQSEDFAVYYCALFYSNLWVFGQGTKLEI |
| | KGGGGTDKTHTCPPCPAPELLGGPSVFLFPPKPKDTLMISRTP |
| | EVTCVVVDVSHEDPEVKFNWYVDGVEVHNAKTKPREEQYN |
| | STYRVVSVLTVLHQDWLNGKEYKCKVSNKALPAPIEKTISKA |
| | KGQPREPQVYTLPPSRDELTKNQVSLTCLVKGFYPSDIAVEW |
| | ESNGQPENNYKTTPPVLDSDGSFFLYSKLTVDKSRWQQGNVF |
| | SCSVMHEALHNHYTQKSLSLSPGK |
| SEQ ID NO: 101 - SP34 | EVQLVESGGGLVQPGGSLRLSCAASGFTFNTYAMNWVRQAP |
| humanized VH1 domain | GKGLEWVARIRSKYNNYATYYADSVKGRFTISRDDSKNTLY |
| | LQMNSLRAEDTAVYYCVRHGNFGNSYVSWFAYWGQGTTTVT |
| | VSS |
| SEQ ID NO: 102 - SP34 | EVQLVESGGGLVQPGGSLRLSCAASGFTFNTYAMNWVRQAP |
| humanized VH2 domain | GKGLEWVARIRSKYNNYATYYADSVKSRFTISRDDSKNTLYL |
| | QMNSLRAEDTAVYYCVRHGNFGNSYVSWFAYWGQGTTVTV |
| | SS |
| SEQ ID NO: 103 - SP34 | EVQLVESGGGLVQPGGSLRLSCAASGFTFNTYAMNWVRQAP |
| humanized VH3 domain | GKGLEWVARIRSKYNNYATYYADSVKSRFTISRDDSKNTLYL |
| | QMNSLRAEDTAVYYCVRHGNFGNSYVSYFAYWGQGTTVV |
| | SS |
| SEQ ID NO: 104 - SP34 | EVQLVESGGGLVQPGGSLRLSCAASGFTFNTYAMNWVRQAP |
| humanized VH5 domain | GKGLEWVARIRSKYNNYATYYADSVKGRFTISRDDSKNTLY |
| | LQMNSLRAEDTAVYYCVRHGNFGNSYVSYFAYWGQGTTVT |
| | VSS |
| SEQ ID NO: 105 - SP34 | EIVVTQSPATLSVSPGERATLSCRSSTGAVTTSNYANWVQEKP |
| humanized VL21 | GQAFRGLIGGANKRAPGVPARFSGSLSGDEATLTISSLQSEDF |
| domain | AVYYCALWYSNLWVFGQGTKLELK |
| SEQ ID NO: 106 - SP34 | EIVVTQSPATLSVSPGERATLSCRSSTGAVTAANYANWVQEK |
| humanized VL32 | PGQAFRGLIGGANKRAPGVPARFSGSLSGDEATLTISSLQSED |
| domain | FAVYYCALFYSNLWVFGQGTKLEIK |
| SEQ ID NO: 107 - | EVQLVESGGGLVQPGGSLRLSCAASGFNIKDTYIHWYRQAPG |
| Humanized anti-HER2 | KGLEWVARIYPTNGYTRYADSVKGRFTISADTSKNTAYLQM |
| antibody 4D5 - scFv | NSLRAEDTAVYYCSRWGGDGFYAMDYWGQGTLVTVSSGGG |
| fragment | GSGGGGSGGGGSDIQMTQSPSSLSASVGDRVTITCRASQDVN |
| | TAVAWYQQKPGKAPKLLIYSASFLYSGVPSRFSGSRSGTDFTL |
| | TISSLQPEDFATYYCQQHYTTPPTFGQGTKVEIK |
| SEQ ID NO: 108 - | EVQLVESGGGLVQPGGSLRLSCAASGFNIKDTYIHWVRQAPG |
| Humanized anti-HER2 | KGLEWVARIYPTNGYTRYADSVKSRFTISADTSKNTAYLQMN |
| antibody 4D5 - FAB | SLRAEDTAVYYCSRWGGDGFYAMDYWGQGTLVTVSS |
| fragment heavy chain | |
| (VH-VH1)with | |
| VH: G65S substitution | |
| SEQ ID NO: 109 - | EVQLVESGGGLVQPGGSLRLSCAASGFNIKDTVIHWVRQAPG |
| Humanized anti-HER2 | KGLEWVARIYPTNGYTRYADSVKSRFTISADTSKNTAYLQMN |
| antibody 4D5 - scFv | SLRAEDTAVYYCSRWGGDGFYAMDYWGQGTLVTVSSGGGG |
| fragment with VH: G65S | SGGGGSGGGGSDIQMTQSPSSLSASVGDRVTITCRASQDVNT |
| substitution | AVAWYQQKPGKAPKLLIYSASFLYSGVPSRESGSRSGTDFTLT |
| | ISSLQPEDFATYYCQQHYTTPPTFGQGTKVEIK |
| SEQ ID NO: 110 - | EVQLVESGGGLVQPGGSLRLSCAASGFNIKDTYIHWVRQAPG |
| Humanized anti-HER2 | KGLEWVARIYPTNGYTRYADSVKGRFTISADTSKNTAYLQMS |
| antibody 4D5 - FAB | SLRAEDTAVYYCSRWGGDGFYAMDYWGQGTLVTVSS |
| fragment heavy chain | |
| (VH-VH1)with | |
| VH: N82aS substitution | |
| SEQ ID NO: 111 - | EVQLVESGGGLVQPGGSLRLSCAASGFNIKDTVIHWVRQAPG |
| Humanized anti-HER2 | KGLEWVARIYPTNGYTRYADSVKGRFTISADTSKNTAYLQMS |
| antibody 4D5 - scFv | SLRAEDTAVYYCSRWGGDGFYAMDYWGQGTLVTVSSGGGG |
| fragment with | SGGGGSGGGGSDIQMTQSPSSLSASVGDRVTITCRASQDVNT |
| V14: N82aS substitution | AVAWYQQKPGKAPKLLIYSASFLYSGVPSRFSGSRSGTDFTLT |
| | ISSLQPEDFATYYCQQHYTTPPTFGQGTKVEIK |
| SEQ ID NO: 112 - | QVELVESGGSLKLSCAASGFDFSRSWMNWVRQAPGKGLEWI |
| OKT10 mouse VH | GEINPDSSTINYTTSLKDKFIISRDNAKNTLYLQMTKVRSEDTA |
| domain | LYYCARYGNWFPYWGQGTLVTVSS |
| SEQ ID NO: 113 - | DILMIQSQKIMPTSVGDRVSVTCKASQNVDTNVAWYQQKPG |
| OKT10 mouse VL | QSPKALIYSASYRYSGVPDRFTGSGSGTDFTLTITNVQSEDLA |
| domain | EYFCQQYDSYPLTFGAGTKLDLKR |
| SEQ ID NO: 114 - HB-7 | KVQLQESGPSLVQPSQRLSITCTVSGFSLISYGVHWVRQSPGK |
| mouse VH domain | GLEWLGVIWRGGSTDYNAAFMSRLSITKDNSKSQVFFKMNS |
| | LQADDTAIYFCAKTLITTGYAMDYWGQGTTVTVSS |
| SEQ ID NO: 115 - HB-7 | DIELTQSPSSFSVSLGDRVTITCKASEDIYNRLAWYQQKPGNA |
| mouse VL domain | PRLLISGATSLETGVPSRFSGSGSGKDYTLSITSLQTEDVATYY |
| | CQQYWSTPTFGGGTKLEIK |
| SEQ -ID NO: 116 - | QVQLQESGPGLVKPSETLSLTCTVSGFSLISYGVHWVRQPPGK |
| Humanized HB-7 best- | GLEWLGVIWRGGSTDYNAAFMSRLTISKDNSKNQVSLKLSSV |
| fit VH domain | TAADTAVYFCAKTLITTGYAMDYWGQGTLVTVSS |
| SEQ ID NO: 117 - | DIQLTQSPSSLSASVGDRVTITCRASEDIYNRLAWYQQKPGKA |
| Humanized HB-7 best- | PKLLISGATSLETGVPSRFSGSGSGKDYTLTISSLQPEDFATYY |
| fit VL domain | CQQYWSTPTFGQGTKLEIK |
| SEQ ID NO: 118 - | QVQLQESGPGLVKPSETLSLTCTVSGFSLISYGVHWVRQPPGK |
| Humanized HB-7 best- | GLEWLGVIWRGGSTDYNAAFMSRLTISKDNSKNQVSLKLSSV |
| fit heavy chain | TAADTAVYFCAKTLITTGYAMDYWGQGTLVTVSSASTKGPS |
| | VFPLAPSSKSTSGGTAALGCLVKDYFPEPVTVSWNSGALTSG |
| | VFPLAVLQSSGLYSLSSVVTVPSSSLGTQTYICNVNHKPSNT |
| | KVDKKVEPKSCDKTHTCPPCPAPELLGGPSVFLFPPKPKDTLM |
| | ISRTPEVTCVVVDVSHEDPEVKFNWNYVDGVEVHNAKTKPRE |
| | EQYNSTYRVVSVLTVLHQDWLNGKEYKCKVSNKALPAPIEK |
| | TISKAKGQPREPQVYTLPPSRDELTKNQVSLTCLVKGFYPSDI |
| | AVEWESNGQPENNYKTTPPVLDSDGSFFLYSKLTVDKSRWQ |
| | QGNVFSCSVMHEALHNHYTQKSLSLSPGK |
| SEQ ID NO: 119 - | DIQLTQSPSSLSASVGDRVTITCRASEDIYNRLAWYQQKPGKA |
| Humanized HB-7 best- | PKLLISGATSLETGVPSRFSGSGSGKDYTLTISSLQPEDFATYY |
| fit light chain | CQQYWSTPTFGQGTKLEIKRTVAAPSVFIFPPSDEQLKSGTAS |
| | VVCLLNNFYPREAKVQWKVDNALQSGNSQESVFEQDSKDST |
| | YSLSSTLTLSKADYEKHKVYACEVTHQGLSSPVTKSFNRGEC |
| SEQ ID NO: 120 - | KVQLQESGPSLVQPSQRLSITCTVSGFSLISYGVHWVRQSPGK |
| Chimeric HB-7 heavy | GLEWLGVIWRGGSTDYNAAFMSRLSITKDNSKSQVFFKMNS |
| chain IgG1 | LQADDTAIYFCAKTLITTGYAMDYWGQGTTVTCSSASTKGPS |
| | VFPLAPSSKSTSGGTAALGCLVKDYFPEPVTVSWNSGALTSG |
| | VHTFPAVLQSSGLYSLSSVVTVPSSSLGTQTYICNVNHKPSNT |
| | KVDKKVEPKSCDKTHTCPPCPAPELLGGPSVFLFPPKPKDTLM |
| | ISRTPEVTCVVVDVSHEDPEVKFNWYVDGVEVHNAKTKPRE |
| | EQYNSTYRVVSVLTVLHQDWLNGKEYKCKVSNKALPAPIEK |
| | TISKAKGQPREPQVYTLPPSRDELTKNQVSLTCLVKGFYPSDI |
| | AVEWESNGQPENNYKTTPPVLDSDGSFFLYSKLTVDKSRWQ |
| | QGNVFSCSVMHEALHNHYTQKSLSLSPGK |
| SEQ ID NO: 121 - | DIELTQSPSSFSVSLGDRVTITCKASEDIYNRLAWYQQKPGNA |
| Chimeric HB-7 human | PRLLISGATSLETGVPSRFSGSGSGKDYTLSITSLQTEDVATYY |
| kappa light chain | CQQYWSTPTFGGGTKLEIKRTVAAPSVFIFPPSDEQLKSGTAS |
| | VVCLLNNFYPREAKVQWKVDNALQSGNSQESVTEQDSKDST |
| | YSLSSTLTLSKADYEKHKVYACEVTHQGLSSPVTKSFNRGEC |
| SEQ ID NO: 122 - 9G7 | QVTLKESGPGILQPSQTLSLTCSFSGLSLSTSGKGVGWIRQPSG |
| mouse VH domain | KGLEWLAHIWWDDDKRYNPALKSRLTISKDTSSNQVFLKIAS |
| | VDTADTATYYCARIELGRSYVMDYWGQGTTVTVSS~ |
| SEQ ID NO: 123 - 9G7 | DIVMTQSHKFMSTSVGDRVSISCKASQDVITSVAWFQQKPGQ |
| mouse VL domain | SPKLLIYSASYRYTGVPDRFTGSGSGTDFTFTISSVQAEDLAVY |
| | YCQQHYTIPLTFGAGTKLELK |
| SEQ ID NO: 124 - | QVTLKESGPTLVKPTQTLTLTCTFSGLSLSTSGKGVGWIRQPP |
| Humanized 9G7 best-fit | GKALEWLAHIWWDDDKRYNPALKSRLTITKDTSKNQVVLT |
| heavy chain | MTNMDPVDTATYYCARIELGRSYVMDYWGQGTLVTVSSAS |
| | TKGPSVFPLAPSSKSTSGGTAALGCLVKDYFPEPVTVSWNSG |
| | ALTSGVHTFPAVLQSSGLYSLSSVVTVPSSSLGTQTYICNVNH |
| | KPSNTKVDKKVEPKSCDKTHTCPPCPAPELLGGPSVFLFPPKP |
| | KDTLMISRTPEVTCVVVDVSEIEDPEVKFNWYVDGVEVHNAK |
| | TKPREEQYNSTYRVVSVLTVLHQDWLNGKEYKCKVSNKALP |
| | APIEKTISKAKGQPREPQVYTLPPSRDELTKNQVSLTCLVKGF |
| | YPSDIAVEWESNGQPENNYKTTPPVLDSDGSFFLYSKLTVDKS |
| | RWQQGNVFSCSVMHEALHNHYTQKSLSLSPGK~ |
| SEQ ID NO: 125 - | DIQMTQSPSSLSASVGDRVTITCQASQDVITSVAWFQQKPGK |
| Humanized 9G7 best-fit | APKLLIYSASYRYTGVPSRFSGSGSGTDFTFTISSLQPEDIATYY |
| first prototype light | CQQHYTIPLTFGQGTKLEIKRTVAAPSVFIFPPSDEQLKSGTAS |
| chain | VVCLLNNFYPREAKVQWKVDNALQSGNSQESVTEQDSKDST |
| | YSLSSTLTLSKADYEKHKVYACEVTHQGLSSPVTKSFNRGEC |
| SEQ ID NO: 126 - | QVTLKESGPGILQPSQTLSLTCSFSGLSLSTSGKGVGWIRQPSG |
| Chimeric 9G7 heavy | KGLEWLAHIWWDDDKRYNPALKSRLTISKDTSSNQVFLKIAS |
| chain IgG1 | VDTADTATYYCARIELGRSYVMDYWGQGTTVTVSSASTKGP |
| | SVFPLAPSSKSTSGGTAALGCLVKDYFPEPVTVSWNSGALTSG |
| | VHTFPAVLQSSGLYSLSSVVTVPSSSLGTQTYICNVNHKPSNT |
| | KVDKKVEPKSCDKTHTCPPCPAPELLGGPSVFLFPPKPKDTLM |
| | ISRTPEVTCVVVDVSHEDPEVKFNWYVDGVEVHNAKTKPRE |
| | EQYNSTYRVVSVLTVLHQDWLNGKEYKCKVSNKALPAPIEK |
| | TISKAKGQPREPQVYTLPPSRDELTKNQVSLTCLVKGFYPSDI |
| | AVEWESNGQPENNYKTTPPVLDSDGSFFLYSKLTVDKSRWQ |
| | QGNVFSCSVMHEALHNHYTQKSLSLSPGK |
| SEQ ID NO: 127 - | DIVMTQSHKFMSTSVGDRYSISCKASQDVITSVAWFQQKPGQ |
| Chimeric 9G7 human | SPKLLIYSASYRYTGVPDRFTGSGSGTDFTFTISSVQAEDLAVY |
| kappa light chain | YCQQHYTIPLTFGAGTKLELKRTVAAPSVFIFPPSDEQLKSGT |
| | ASVVCLLNNFYPREAKVQWKVDNALQSGNSQESVTEQDSKD |
| | STYSLSSTLTLSKADYEKHKVYACEVTHQGLSSPVTKSFNRG |
| | EC |
| SEQ ID NO: 128 - | DIQMTQSPSSLSASVGDRVTITCQASQDVITSVAWYQQKPGK |
| Humanized 9G7 hest-fit | APKLLIYSASYRYTGVPSRFSGSGSGTDFTFTISSLQPEDIATYY |
| light chain (prototype | CQQHYTIPLTFGQGTKLEIKRTVAAPSVFIFPPSDEQLKSGTAS |
| light chain with F36Y | VVCLLNNFYPREAKVQWKVDNALQSGNSQESVTEQDSKDST |
| substitution) | YSLSSTLTLSKADYEKHKVYACEVTHQGLSSPVTKSFNRGEC |
| SEQ ID NO: 129 - | QVTLKESGPTLVKPTQTLTLTCTFSGLSLSTSGKGVGWIRQPP |
| Humanized 9G7 best-fit | GKALEWLAHIWWDDDKRYNPALKSRLTITKDTSKNQVVLT |
| VH domain | MTNMDPVDTATYYCARIELGRSYVMDYWGQGTLVTVSS |
| SEQ ID NO: 130 - | DIQMTQSPSSLSASVGDRVITIVQASQDVITSVAWFQQKPGK |
| Humanized 9G7 hest-fit | APKLLIYSASYRYTGVPSRFSGSGSGTDFTFTISSLQPEDIATYY |
| VL domain | CQQHYTIPLTFGQGTKLEIK |
| SEQ ID NO: 131 - | EVQLVESGGGLVQPGGSLRLSCAFSGLSLSTSGKGVGWIRQA |
| Humanized 9G7 best- | PGKGLEWLAHIW~WDDDKRYNPALKSRLTISKDTSKNTVYIL |
| framework heavy chain | QMNSLRAEDTAVYYCARIELGRSYVMDYWGQGTLVTVSSAS |
| | TKGPSVFPLAPSSKSTSGGTAALGCLVKDYFPEPVTVSWNSG |
| | ALTSGVHTFPAVLQSSGLYSLSSVVTVPSSSLGTQTYICNVNH |
| | KPSNTKVDKKVEPKSCDKTHTCPPCPAPELLGGPSVFLFPPKP |
| | KDTLMISRTPEVTCVVVDVSHEDPEVKFNWYVDGVEVHNAK |
| | TKPREEQYNSTYRVVSVLTVLHQDWLNGKEYKCKVSNKALP |
| | APIEKTISKGQPREPQVYTLPPSRDELTKNQVSLTCLVKGF |
| | YPSDIAVEWESNGQPENNYKTTPPVLDSDGSFFLYSKLTVDKS |
| | RWQQGNVFSCSVMHEALHNHYTQKSLSLSPGK |
| SEQ ID NO: 132 - | DIQMTQSPSSLSASVGDRVTITCRASQDVITSVAWFQQKPGKA |
| Humanized 9G7 best- | PKLLIYSASYRYTGVPSRFSGSGSGTDFTLTISSLQPEDFATYY |
| framework light chain | CQQHYTIPLTFGQGTKVEIKRTVAAPSVFIFPPSDEQLKSKDST |
| | VVCLLNNFYPREAKVQWKVDNALQSGNSQESVTEQDSKDST |
| | YSLSSTLTLSKADYEKHKVYACEVTHQGLSSPVTKSFNRGEC |
| SEQ ID NO: 133 - | EVQLVESGGGLVQPGGSLRLSCAFSGLSLSTSGKGVGWIRQA |
| Humanized 9G7 best- | PGKGLEWLAHIW~WDDDKRYNPALKSRLTISKDTSKNTVYL |
| framework VH domain | QMNSLRAEDTAVYYCARIELGRSYVMDYWGQGTLVTVSS |
| SEQ ID NO: 134 - | DIQMTQSPSSLSASVGDRVTITCRASQDVITSVAWFQQKPGKA |
| Humanized 9G7 best- | PKLLIYSASYRYTGVPSRFSGSGSGTDFTLTISSLQPEDFATYY |
| framework VL domain | CQQHYTIPLTFGQGTKVEIK |
| SEQ ID NO: 135 - | QVQLVESGGGLVQPGGSLRLSCAASGFTFSSYWMSWVRQAP |
| Human clone 767 VH | GKGLEWVANIKQDGSEKYYVDSVKGRFTISRDNAKNSLYLQ |
| domain | MNSLRAEDTAVYYCAREGRTGYFDYWGQGTLVTVSS |
| SEQ ID NO: 136 - | QSVLTQPPSASGTPGQRVTISCSGSTSNIGTNYVYWYQQLPGT |
| Human clone 767 VL | APKLLIYRNDQRPSGVPDRFSGSKSGTSASLAISGLRSEDEAD |
| domain | YYCAAWDDSRSGVYAFGTGTKVTVL |
| SEQ ID NO: 137 - | QVQLVESGGGLVQPGGSLRLSCAASGFTSSYWMSWVRQAP |
| Human 767 heavy chain | GKGLEWVANIKQDGSEKYYVDSVKGRFTISRDNAKNSLYLQ |
| | MNSLRAEDTAVYYCAREGRTGYFDYWGQGTLVTVSSASTK |
| | GPSVFPLAPSSKSTSGGTAALGCLVKDYFPEPVTVSWNSGALT |
| | SGVHTFPAVLQSSGLYSLSSVVTVPSSSLGTQTYICNVNHKPS |
| | NTKVDKKVEPKSCDKTHTCPPCPAPELLGGPSVFLFPPKPKDT |
| | LMISRTPEVTCVVVDVSHEDPEVKFNWYVDGVEVHNAKTKP |
| | REEQYNSTYRVVSVLTVLHQDWLNGKEYKCKVSNKALPAPI |
| | EKTISKAKGQPREPQVYTLPPSRDELTKNQVSLTCLVKGFYPS |
| | DIAVEWESNGQPENNYKTTPPVLDSDGSFFLYSKLTVDKSRW |
| | QQGNVFSCSVMHEALHNHYTQKSLSLSPGK |
| SEQ ID NO: 138 - | QSVLTQPPSASGTPGQRVTISCSGSTSNIGTNYVYWYQQLPGT |
| Human 767 light chain | APKLLIYRNDQRPSGVPDRFSGSKSGTSASLAISGLRSEDEAD |
| | YYCAAWDDSRSGVYAFGTGTKVTVLRTVAAPSVFIFPPSDEQ |
| | LKSGTASVVCLLNNFYPREAKVQWKVDNALQSGNSQESVTE |
| | QDSKDSTYSLSSTLTLSKADYEKHKVYACEVTHQGLSSPVTK |
| | SFNRGEC |
| SEQ ID NO: 139 - | QVTLKESGPGILQPSQTLSLTCSFSGFSLSTSGMGVGWIRQPSG |
| Mouse anti-human | KGLEWLAHIWWDDDKYYNTALKSGLTISKDTSKNQVFLKIA |
| OX40 antibody VH | SVDTTDTATYYCARIDWDGFAYWGQGTLVTVSS |
| domain from | |
| WO2013/0081711 | |
| SEQ ID NO: 140 - | QIVLTQSPAILSASPGEKVTMTCRASSSVSYMHWYQQKPGSSP |
| Mouse anti-human | KPWIYATSNLASGVPARFSGSGSGTSYSLTINRVEAEDAATYY |
| OX40 antibody VL | CQQWSSNPWTFGGGTKLEIK |
| domain from | |
| WO2013/008171 | |
| SEQ ID NO: 141 - | QVTLKESGPALVKPTQTLTLTCSFSGFSLSTSGMGVGWIRQPP |
| Humanized anti-human | GKALEWIAHIWWDDDKYYNTALKTRLTISKIDTSKNQVVLTM |
| OX40 antibody VH | TNMDPVDTATYYCARIDWDGFAYWGQGTLVTVSS |
| domain from | |
| WO2013/008171 | |
| SEQ ID NO: 142 - | EIVLTQSPATLSLSPGERATLSCRASSSVSYMHWYQQKPGQAP |
| Humanized anti-human | RPWIYATSNRATGIPARFSGSGSGTDYTLTISSLEPEDFAVYYC |
| OX40 antibody VL | QQWSSNPWTFGQGTKVEIK |
| domain from | |
| WO2013/008171 | |
| SEQ ID NO: 143 - | QVQLQQPGAELVKPGASVKMSCKASGYTFTSYNMHWVKQT |
| rituximab mouse VH | PGRGLEWIGAIYPGNGDTSYNQKFKGKATLTADKSSSTAYM |
| domain | QLSSLTSEDSAVYYCARSTYYGGDWYFNVWGAGTTVTVSA |
| SEQ ID NO: 144 - | QIVLSQSPAILSASPGEKVTMETTCRASSSVSYIHWFQQKPGSS |
| rituximab mouse VL | PKPWIYATSNLASGVPVRFSGSGSGTSYSLTISRVEAEDAATY |
| domain | YCQQWTSNPPTFGGGTKLELK |
| SEQ ID NO: 145 - | QVQLKQSGPGLVQPSQSLSITCTVSGFSLTNYGVHWVRQSPG |
| cetuximab mouse VH | KGLEWLGVIWSGGNTDYNTPFTSRLSINKDNSKSQVFFKMNS |
| domain | LQSNDTAIYYCARALTYYDYEFAYWGQGTLVTVSA |
| SEQ ID NO: 146 - | DILLTQSPVILSVSPGERVSFSCRASQSIGTNIHWYQQRTNGSP |
| cetuximab mouse VL | RLLIKYASESISGIPSRFSGSGSGTDFTLSINSVESEDIADYYCQ |
| domain | QNNNWPTTFGAGTKLELK |
| SEQ ID NO: 147 - BTA | GQPREPQVYTLPPSRDELTKNQVKLVCLVTGFYPSDIAVEWE |
| CH3 NO: 1 Original | SNGQPENNYYTTPPVLDSDGSFSLVSWLNVDKSRWQQGNVF |
| BTA 11 | SCSVMHEALHNHYTQKSLSLSPGK~~~~~~~~~~~~~~~~~~~~~~ |
| | ~~~~~~~~~~~~~~~~~~~~~~~~~~~~~~~~~~~~~~~~~~~~~~~~~~ |
| | ~~~~~~~~~~~~~~~~~~~~~~~~~~~~~~~~~~~~~~~~~~~~~~~~~~ |
| | ~~~~~~~~~~~~~~~~~~~~~~~~~~~~~~~~~~~~~~~~ |
| SEQ ID NO: 148 - BTA | GQPREPAVYTLPPSRDELTKNQVKLVCLVTGFYPSDIAVEWE |
| CH3 NO: 2 BTA FTO | SNGQPENNYYTTPPVLDSDGSFSLVSWLNVDKSRWQQGNVF |
| 11 | SCSVMHEALHNHYTQRSLSLSPGK~~~~~~~~~~~~~~~~~~~~~~ |
| | ~~~~~~~~~~~~~~~~~~~~~~~~~~~~~~~~~~~~~~~~~~~~~~~~~~ |
| | ~~~~~~~~~~~~~~~~~~~~~~~~~~~~~~~~~~~~~~~~~~~~~~~~~~ |
| | ~~~~~~~~~~~~~~~~~~~~~~~~~~~~~~~~~~~~~~~~ |
| SEQ ID NO: 149 - BTA | GQPREPAVYTLPPSREEMTKNQVKLVCLVTGFYPSDIAVEWE |
| CH3 NO: 3 BTA FTO | SSGQPENNYYTTPPVLDSDGSFSLVSWLNVDKSRWQQGNVS |
| 33 411D | SCSVMHEALHNHYTQKSLSLSPGK~~~~~~~~~~~~~~~~~~~~~~ |
| | ~~~~~~~~~~~~~~~~~~~~~~~~~~~~~~~~~~~~~~~~~~~~~~~~~~ |
| | ~~~~~~~~~~~~~~~~~~~~~~~~~~~~~~~~~~~~~~~~~~~~~~~~~~ |
| | ~~~~~~~~~~~~~~~~~~~~~~~~~~~~~~~~~~~~~~~~ |
| SEQ ID NO: 150 - BTB | GQPREPEVATFPPSRDELTKNQVTLVCLVTGFYPSDIAVEWES |
| CH3 NO: 1 Original | NGQPENNYKTDPPLLESDGSFALSSRLRVDKSRWQQGNVFSC |
| BTB | SVMHEALHNHYTQKSLSLSPGK~~~~~~~~~~~~~~~~~~~~~~ |
| | ~~~~~~~~~~~~~~~~~~~~~~~~~~~~~~~~~~~~~~~~~~~~~~~~~~ |
| | ~~~~~~~~~~~~~~~~~~~~~~~~~~~~~~~~~~~~~~~~~~~~~~~~~~ |
| | ~~~~~~~~~~~~~~~~~~~~~~~~~~~~~~~~~~~~~~~~ |
| SEQ ID NO: 151 - BTB | GQPREPEVATFPPSRDELTKNQVTLVCLVTGFYPSDIAVEWES |
| CH3 NO: 2 BTB 401R | NGQPENNYKTDPPLLESRGSFALSSRLRVDKSRWQQGNVFSC |
| 11 | SVMHEALHNHYTQKSLSLSPGK~~~~~~~~~~~~~~~~~~~~~~ |
| | ~~~~~~~~~~~~~~~~~~~~~~~~~~~~~~~~~~~~~~~~~~~~~~~~~~ |
| | ~~~~~~~~~~~~~~~~~~~~~~~~~~~~~~~~~~~~~~~~~~~~~~~~~~ |
| | ~~~~~~~~~~~~~~~~~~~~~~~~~~~~~~~~~~~~~~~~ |
| SEQ ID NO: 152 - BTB | GQPREPEVATFPPSRDELTKNQVTLVCLVTGFYPSDIAVEWES |
| CH3 No 3 BTB 401Q | NGQPENNYKTDPPLLESQGSFALSSRLRVDKSRWQQGNVFSC |
| 11 | SVMHEALHNHYTQKSLSLSPGK~~~~~~~~~~~~~~~~~~~~~~ |
| | ~~~~~~~~~~~~~~~~~~~~~~~~~~~~~~~~~~~~~~~~~~~~~~~~~~ |
| | ~~~~~~~~~~~~~~~~~~~~~~~~~~~~~~~~~~~~~~~~~~~~~~~~~~ |
| | ~~~~~~~~~~~~~~~~~~~~~~~~~~~~~~~~~~~~~~~~ |
| SEQ ID NO: 153 - BTA | GQPREPAVYTLPPSRDELTKNQVKLVCLVTGFYPSDIAVEWE |
| CH3 NO: 4 BTA | SNGQPENNYYTTPPVLDSDGSFSLVSWLTVDKSRWQQGNVF |
| 11 FTO_N411T | SCSVMHEALHNHYTQKSLSLSPGK |
| SEQ ID NO: 154 - BTA | GQPREPAVYTLPPSREEMTKNQVKLVCLVTGFYPSDIAVEWE |
| CH3 NO: 5 BTA | SSGQPENNYYTTPPMLDSDGSFSLVSWLNVDKSRWQQGNIFS |
| 33_FTO | CSVMHEALHNRFTQKSLSLSPGK |
| SEQ ID NO: 155 - BTA | GQPREPAVYTLPPSREEMTKNQVKLVCLVTGFYPSDIAVEWE |
| CH3 NO: 6 BTA | SSGQPENNYYTTPPMLDSDGSFSLVSWLTVDKSRWQQGNIFS |
| 33_FTO_N411T | CSVMHEALHNRETQKSLSLSPGK |
| SEQ ID NO: 156 - BTB | GQPREPEVATFPPSREEMTKNQVTLVCLVTGFYPSDIAVEWES |
| CH3 No: 4 BTB | SGQPENNYNTDPPLLESQGSFALSSRLRVDKSRWQQGNIFSCS |
| 33_D401Q | VMHEALHNRFTQKSLSLSPGK |
| SEQ ID NO: 157 - BTB | GQPREPEVATFPPSRDELTKNQVTLVCLVTGFYPSDIAVEWES |
| CH3 No: 5 BTB | NGQPENNYKTDPPLLESQGSFALSSRLTVDKSRWQQGNVFSC |
| 11_D401Q_R411T | SVMHEALHNHYTQKSLSLSPGK |
| SEQ ID NO: 158 - BTB | GQPREPEVATFPPSREEMTFKNQVTLVCLVTGFYPSDIAVEWES |
| CH3 No 6 BIB | SGQPENNYNTDPPLLESQGSFALSSRLTVDKSRWQQGNIFSCS |
| 33_D401Q_R411T | VMHEALHNRFTQKSLSLSPGK |
| SEQ ID NO: 159 - | EVQLVESGGGLVQPGGSLRLSCAASGYTFTRYTMHWVRQAP |
| BEAT HER2/CD3-1 | GKGLEWIGYINPSRGYTYYADSVKGRFTLSTDKSKNTAYLQ |
| antibody FAB heavy | MSSLRAEDTAVYYCARYYDDHYCLDYWGQGTLVTVSSAST |
| chain (CD3 epsilon arm - | KGPSVFPLAPSSKSTSGGTAALGCLVKDYFPEPVTVSWNSGA |
| humanized OKT3 with | LTSGVHTFPAVLQSSGLYSLSSVVTVPSSSLGTQTYICNVNHK |
| N82aS substitution) | PSNTKVDKKVEPKSCDKTHTCPPCPAPEAAGGPSVFLFPPKPK |
| | DTLMISRTPEVTCVVVDVSHEDPEVQFKWYVDGVEVHNAKT |
| | KPREEQYNSTFRVVSVLTVLHQDWLNGKEYKCKVSNKALPA |
| | PIEKTISKTKGQPREPAVYTLPPSREEMTKNQVKLVCLVTGFY |
| | PSDIAVEWESSGQPENNYYTTPPMLDSDGSFSLVSWLNVDKS |
| | RWQQGNIFSCSVMHEALHNRFTQKSLSLSPGK |
| SEQ ID NO: 160 - | EVQLVESGGGKVQPGGSLRLSCAASGFNIKDTYIHWVRQAPG |
| BEAT HER2/CD3-1 | KGLEWVARIYPTNGYTRYADSVKGRFTISADTSKNTAYLQM |
| antibody scFv heavy | NSLRAEDTAVYYCSRWGGDGFYAMDYWGQGTLVTVSSGGG |
| chain (HER2 arm) | GSGGGGSGGGGSDIQMTQSPSSLSASVGDRYTITCRASQDVN |
| | TAVAWYQQKPGKAPKLLIYSASFLYSGVPSRFSGSRSGTDFTL |
| | TISSLQPEDFATYYCQQHYTTPPTFGQGTKVEIKRGGGGTDKT |
| | HTCPPCPAPEAAGGPSVFLFPPKPKDTLMISRTPEVTCVVVDV |
| | SHEDPENKFNWYVDGVEVHNAKTKPREEQYNSTYRVVSVLT |
| | VLHQDWLNGKEYKCKVSNKALPAPIEKTISKAKGQPREPEVA |
| | TFPPSRDELTKNQVTLVCLVTGFYPSDIAVEWESNGQPENNY |
| | KTDPPLLESDGSFALSSRLRVDKSRWQQGNVFSCSVMHEALH |
| | NHYTQKSLSLSPGK |
| SEQ ID NO: 161 - | EVQLVESGGGLVQPGGSLRLSCAASGFNIKDTYIHWVRQAPG |
| BEAT HER2/CD3-2 | KGLEWVARIYPTNGYTRYADSVKGRFTISADTSKNTAYLQM |
| antibody FAB heavy | NSLRAEDTAVYYCSRWGGDGFYAMDYWGQGTLVTVSSAST |
| chain (HER2 arm) | NGPSVFPLAPSSKSTSGGTAALGCLVKDYFPEPVTVSWNSGA |
| | LTSGVHTFPAVLQSSGLYSLSSVVTVPSSSLGTQTYICNVNHK |
| | PSNTKVDKKVEPKSCDKTHTCPPCPAPEAAGGPSVFLFPPKPK |
| | DTLMISRTPEVTCVVVDVSHEDPEVKFNWYVDGVEVHNAKT |
| | KPREEQYNSTYRVVSVLTVLHQDWLNGKEYKCKVSNKALPA |
| | PIEKTISKAKGQPREPAVYTLPPSRDELTKNQVKLVCLVTGFY |
| | PSDIAVEWESNGQPENNYYTTPPVLDSDGSFSLVSWLNVDKS |
| | RWQQGNVFSCSVMHEALHNHYTQKSLSLSPGK |
| SEQ ID NO: 162 - | EVQLVESGGGLVQPGGSLRLSCAASGYTFTRYTMHWVRQAP |
| BEAT HER2/CD3-2 | GKGLEWIGYINPSRGYTYYADSVKGRFTLSTDKSKNTAYLQ |
| antibody scFv heavy | MSSLRAEDTAVYYCARYYDDHYCLDYWGQGTLVTVSSGGG |
| chain (CD3 epsilon arm - | GSGGGGSGGGGSGGGASDIQLTQSPSSLSASVGDRVTITCRAS |
| humanized OKT3 with | SSVSYVAWYQQKPGKAPKRWIYDTSKLYSGVPSRFSGSGSGT |
| N82aS substitution) | DYTLTISSLQPEDFATYYCQQWSSNPPTFGQGTKVEIKGGGGT |
| | DKTHTCPPCPAPEAAGGPSVFLFPPKPKDTLMISRTPEVTCVV |
| | VDVSHEDPEVQFKWYVDGVEVHNAKTKPREEQYNSTFRVVS |
| | VLTVLHQDWLNGKEYKCKVSNKALPAPIEKTISKTKGQPREP |
| | EVATFPPSREEMTKNQVTLVCLVTGFYPSDIAVEWESSGQPE |
| | NNYNTDPPLLESDGSFALSSRLRVDKSRWQQGNIFSCSVMHE |
| | ALHNRFTQKSLSLSPGK |
| SEQ ID NO: 163 - | EVQLVESGGGLVQPGGSLRLSCAASGYTFTRYTMHWVRQAP |
| BEAT HER2/CD3-3 | GKGLEWIGYINPSRGYTYYADSVKSRFTLSTDKSKNTAYLQM |
| antibody FAB heavy | NSLRAEDTAVYYCARYYDDHYCLDYWGQGTLVTVSSASTK |
| chain(CD3 epsilon arm - | GPSVFPLAPSSKSTSGGTAALGCLVKDYFPEPVTVSWNSGALT |
| humanized OKT3 with | SGVHTFPAVLQSSGLYSLSSVVTVPSSSLGTQTYICNVNHKPS |
| G65S substitution) | NTKVDKKVEPKSCDKTHTCPPCPAPEAAGGPSVFLFPPKPKD |
| | TLMISRTPEVTCVVVDVSHEDPEVQFKWYVDGVEVHNAKTK |
| | PREEQYNSTFRVVSVLTVLHQDWLNGKEYKCKVSNKALPAPI |
| | EKTISKTKGQPREPAVYTLPPSREEMTKNQVKLVCLVTGFYPS |
| | DIAVEWESSGQPENNYYTTPPMLDSDGSFSLVSWLNVDKSR |
| | WQQGNIFSCSVMHEALHNRFTQKSLSLSPGK |
| SEQ ID NO: 164 - | EVQLVESGGGLVQPGGSLRLSCAASGFNIKDTYIHWVRQAPG |
| BEAT HER2/CD3-3 | KCLEWVARIYPTNGYTRYADSVKGRFTISADTSKNTAYLQM |
| antibody scFv heavy | NSLRAEDTAVYYCSRWGGDGFYAMDYWGQGTLVTVSSGGG |
| chain (HER2 arm with | GSGGGGSGGGGSDIQMTQSPSSLSASVGDRVITFCRASQDVN |
| additional disulfide | TAVAWYQQKPGKAPKLLIYSASFLYSGVPSRFSGSRSGTDFTL |
| bond) | TISSLQPEDFATYYCQQHYTTPPTFGCGTKVEIKGGGGTDKTH |
| | TCPPCPAPEAAGGPSVFLFPPKPKDTLMISRTPEVTCVVVDVS |
| | HEDPEVKFNWYVDGVEVHNAKTKPREEQYNSTYRVVSVLTV |
| | LHQDWLNGKEYKCKVSNKALPAPIEKTISKAKGQPREPEVAT |
| | FPPSRDELTKNQVTLVCLVTGFYPSDIAVEWESNGQPENNYK |
| | TDPPLLESQGSFALSSRLRVDKSRWQQGNVFSCSVMHEALHN |
| | HYTQKSLSLSPGK |
| SEQ ID NO: 165 - | EVQLVESGGGLVQPGGSLKLSCAASGFTFNKYAMNWVRQAP |
| BEAT | GKGLEWVARIRSKYNNYATYYADSVKDRFTISRDDSKNTAY |
| HER2/CD3(SP34) | LQMNNLKTEDTAVYYCVRHGNFGNSYISYWAYWGQGTLVT |
| antibody FAB heavy | VSSASTKGPSVFPLAPSSKSTSGGTAALGCLVKDYFPEPVTVS |
| chain(CD3 epsilon arm - | WNSGALTSGVHTFPAVLQSSGLYSILSSVVTVPSSSLGTQTYIC |
| humanized SP34 VH | NVNHKPSNTKVDKKVEPKSCDKTHTCPPCPAPEAAGGPSVFL |
| from WO2008/119565) | FPPKPKDTLMISRTPEVTCVVVDVSHEDPEVKFNWYVDGVEV |
| | HNAKTKPREEQYNSTYRVVSVLTVLHQDWLNGKEYKCKVS |
| | NKALPAPIEKTISKAKGQPREPAVYTLPPSRDELTKNQVKLVC |
| | LVTGFYPSDIAVEWESNGQPENNYYTTPPVLDSDGSFSLVSW |
| | LNVDKSRWQQGNVFSCSVMHEALHNHYTQKSLSLSPGK |
| SEQ ID NO: 166 - | QTVVTQEPSLTVSPGGTVTLTCGSSTGAVTSGNYPNWVQQKP |
| BEAT | GQAPRGLIGGTKFLAPGTPARFSGSLLGGKAALTLSGVQPEDE |
| HER2/CD3(SP34) | AEYYCVLWYSNRWVFGGGTKLTVLGRTVAAPSVFIFPPSDEQ |
| antibody FAB light | LKSGTASVVCLLNNFYPREAKVQWKVDNALQSGNSQESVTE |
| chain(CD3 epsilon arm - | QDSKDSTYSLSSTLTLSKADYEKHKVYACEVTHQGLSSPVTK |
| humanized SP34 VL | SFNRGEC |
| from WO2008/119565) | |
| SEQ ID NO: 167 - | EVQLVESGGGLVQPGGSLRLSCAASGFNIKDTYIHWVRQAPG |
| BEAT | KGLEWVARIYPTNGYTRYADSVKGRFTISADTSKNTAYLQMS |
| HER2/CD3(SP34) | SLRAEDTAVYYCSRWGGDGFYAMDYWGQGTLVTVSSGGGG |
| antibody scfv heavy | SGGGGSGGGGSDIQMTQSPSSLSASVGDRVTITCRASQDVNT |
| chain (HER2 arm with | AVAWYQQKPGKAPKLLIYSASFLYSGVPSRFSGSRSGTDFTLT |
| N82aS substitution) | ISSLQPEDFATYYCQQHYTTPPTFGQGTKVEIKGGGGTDKTHT |
| | CPPCPAPEAAGGPSVFLFPPKPKDTLMISRTPEVTCVVVDVSH |
| | EDPEVQFKWYVDGVEVHNAKTKPREEQYNSTFRVVSVLTVL |
| | HQDWLNGKEYKCKVSNKALPAPIEKTISKTKGQPREPEVATF |
| | PPSREEMTKNQVTLVCLVTGFYPSDIAVEWESSGQPENNYNT |
| | DPPLLESQGSFALSSRLRVDKSRWQQGNIFSCSVMHEALHNR |
| | FTQKSLSLSPGK |
| SEQ ID NO: 168 - | EVQLVESGGGLVQPGGSLRLSCAASGFTFNTYAMNWVRQAP |
| BEAT | GKGLEWVARIRSKYNNYATYYADSVKGRFTISRDDSKNTLY |
| HER2/CD3(SP34- | LQMNSLRAEDTAVYYCVRHGNFGNSYVSWFAYWGQGTTVT |
| Kappa1) antibody FAB | VSSASTKGPSVFPLAPSSKSTSGGTAALGCLVKDYFPEPVTVS |
| heavy chain(CD3 | WNSGALTSGVHTFPAVLQSSGLYSLSSVVTVPSSSLGTQTYIC |
| epsilon arm - humanized | NVNHKPSNTKVDKKVEPKSCDKTHTCPPCPAPEAAGGPSVFL |
| SP34 VH1) | FPPKPKDTLMISRTPEVTCVVVDVSHEDPEVKFNWYVDGVEV |
| | HNAKTKPREEQYNSTYRVVSVLTVLHQDWLNGKEYKCKVS |
| | NKALPAPIEKTISKAKGQPREPAVYTLPPSRDELTKNQVKLVC |
| | LVTGFYPSDIAVEWESNGQPENNYYTTPPVLDSDGSFSLVSW |
| | LNVDKSRWQQGNVFSCSVMHEALHNHYTQKSLSLSPGK |
| SEQ ID NO: 169 - | QVQLQESGPGLVKPSETLSLTCTVSGFSLISYGVHWVRQPPGK |
| BEAT CD38- | GLEWLGVIWRGGSTDYNAAFMSRLTISKDNSKNQVSLKLSSV |
| HB7bestfit/CD3 | TAADTAVYFCAKTLITTGYAMDYWGQGTLVTVSSASTKGPS |
| antibody FAB heavy | VFPLAPSSKSTSGGTAALGCLVKDYFPEPVTVSWNSGALTSG |
| chain (CD38 arm - | VHTFPAVLQSSGLYSLSSVVTVPSSSLGTQTYICNVNHKPSNT |
| humanized HB-7 best- | KVDKKVEPKSCDKTHTCPPCPAPEAAGGPSVFLFPPKTKDTL |
| fit) | MISRTPEVTCVVVDVSHEDPEVKFNWYVDGVEVHNAKTKPR |
| | EEQYNSTYRVVSVLTVLHQDWLNGKEYKCKVSNKALPAPIE |
| | KTISKAKGQPREPAVYTLPPSRDELTKNQVKLVCLVTGFYPSD |
| | IAVEWESNGQPENNYYTTPPVLDSDGSFSLVSWLNVDKSRW |
| | QQGNVFSCSVMHEALHNHYTQKSLSLSPGK |
| SEQ ID NO: 170 - | QVQLQESGPGLVKPSETLSLTCTVSGFSLISYGVHWVRQPPGK |
| BEAT CD38-767/CD3 | GLEWLGVIWRGGSTDYNAAFMSRLTISKDNSKNQVSLKLSSV |
| antibody FAB heavy | TAADTAVYFCAKTLITTGYAMDYWGQGTLVTVSSASTKGPS |
| chain (CD38 arm - | VFPLAPSSKSTSGGTAALGCLVKDYFPEPVTVSWNSGALTSG |
| human clone 767) | VHTFPAVLQSSGLYSLSSVVTVPSSSLGTQTYICNVNHKPSNT |
| | KVDKKVEPKSCDKTHTCPPCPAPEAAGGPSVFLFPPKPKDTL |
| | MISRTPEVTCVVVDVSHEDPEVQFKWYYDGVEVHNAKTKPR |
| | EEQYNSTFRVVSVLTVLHQDWLNGKEYKCKVSNKALPAPIE |
| | KTISKTKGQPREPAVYTLPPSREEMTKNQVKLVCLVLVTGFYPS |
| | DIAVEWESSGQPENNYYTTPPMLDSDGSFSLVSWLNVDKSR |
| | WQQGNIFSCSVMHEALHNRFTQKSLSLSPGK |
| SEQ ID NO: 171 - | EVQLVESGGGLVQPGGSLLKLSCAASGFTFNKYAMNWVRQAP |
| BEAT CD38-767/CD3 | GKGLEWVARIRSKYNNYATYYADSVKDRFTISRDDSKNTAY |
| antibody scFv heavy | LQMNNLKTEDTAVYYCVRHGNFGNSYISYWAYWGQGTLVT |
| chain(CD3 epsilon arm - | VSSGGGGSGGGGSGGGGSQTVVTQEPSLTVSPGGTVTLTCGS |
| humanized OKT3 with | STGAVTSGNYPNWVQQKPGQAPRGLIGGTKFLAPGTPARFSG |
| G65S substitution) | SLLGGKAALTLSGVQPEDEAEYYCVLWYSNRWVFGGGTKLT |
| | VLGGGGGTDKTHTCPPCPAPEAAGGPSVFLFPPKPKDTLMISR |
| | TPEVTCVVVDVSHEDPEVKFNWYVDGVEVHNAKTKPREEQY |
| | NSTYRVVSVLTVLHQDWLNGKEYKCKVSNKALPAPIEKTISK |
| | AKGQPREPEVATFPPSRDELTKNQVTLVCLVTGFYPSDIAVE |
| | WESNGQPENNYKTDPPLLESQGSFALSSRLRVDKSRWQQGN |
| | VFSCSVMHEALHNHYTQKSLSLSPGK |
| SEQ ID NO: 172 - | QVTLKESGPALVKPTQTLTLTCSFSGFSLSTSGMGVGWIRQPP |
| BEAT OX40/CD3 | GKALEWIAHIWWDDDKYYNTALKTRLTISKDTSKNQVVLTM |
| antibody FAB heavy | TNMDPVDTATYYCARIDWDGFAYWGQGTLVTVSSASTKGPS |
| chain (OX40 arm with | VFPLAPSSKSTSGGTAALGCLVKDYFPEPVTVSWNSGALTSG |
| humanized anti-human | VHTFPAVLQSSGLYSLSSVVTVPSSSLGTQTYICNVNHKPSNT |
| OX40 VH domain from | KVDKKVEPKSCDKTHTCPPCPAPEAAGGPSVFLFPPKPKDTL |
| WO2013/008171) | MISRTPEVTCVVVDVSHEDPEVKFNWYVDGVEVHNAKTKPR |
| | EEQYNSTYRVVSVLTVLHQDWLNGKEYKCKVSNKALPAPIE |
| | KTISKAKGQPREPAVYTLPPSRDELTKNQVKLVCLVTGFYPSD |
| | IAVEWESNGQPENNYYTTPPVLDSDGSFSLVSWLNVDKSRW |
| | QQGNVFSCSVMHEALHNHYTQKSLSLSPGK |
| SEQ ID NO: 173 - | EIVILTQSPATLSLSPGERATLSCRASSSVSYMHWYQQKPGQAP |
| BEAT OX40/CD3 | RPWIYATSNRATGIPARFSGSGSGTDYTLTISSLEPEDFAVYYC |
| antibody FAB light | QQWSSNPWTFGQGTKVEIKRTVAAPSVFIFPPSDEQLKSGTAS |
| chain (OX40 arm with | VVCLLNNFYPREAKVQWKVDNALQSGNSQESVTEQDSKDST |
| humanized anti-human | YSLSSTLTLSKADYEKHKVYACEVTHQGLSSPVTKSFNRGEC |
| OX40 VL domain from | |
| WO2013/008171) | |
| SEQ ID NO: 174 - | QVQLKQSGPGLVQPSQSLSITCTVSGFSLTNYGVHWVRQSPG |
| BEAT EGFR/CD3 | KGLEWLGVIWSGGNTDYNTPFTSRLSINKDNSKSQVFFKMNS |
| antibody FAB heavy | LQSNDTAIYYCARALTYYDYEFAYWGQGTLVTVSAASTKGP |
| chain (EGFR arm with | SVFPLAPSSKSTSGGTAALGCLVKDYFPEPVTVSWNSGALTSG |
| mouse Erbitux VH | VHTFPAVLQSSGLYSLSSVVTVPSSSLGTQTYICNVNHKPSNT |
| domain) | KVDKKVEPKSCDKTHTCPPCPAPEAAGGPSVFLFPPKPKDTL |
| | MISRTPEVTCVVVDVSHEDPEVKFNWYVDGVEVHNAKTKPR |
| | EEQYNSTYRVVSVLTVLHQDWLNGKEYKCKNSNKALPAPIE |
| | KTISKAKGQPREPAVYTLPPSRDELTKNQVKLVCLVTGFYPSD |
| | IAVEWESNGQPENNYYTTPPVLDSDGSFSLVSWLNVDKSRW |
| | QQGNVFSCSVMHEALHNHYTQKSLSLSPGK |
| SEQ ID NO: 175 - | DILLTQSPVILSVSPGERVSFSCRASQSIGTNIHWYQQRTNGSP |
| BEAT EGFR/CD3 | RLLIKYASESISGIPSRFSGSGSGTDFTLSINSVESEDIADYYCQ |
| antibody FAB light | QNNNWPTTFGAGTKLELKRTVAAPSVFIFPPSDEQLKSGTASV |
| chain (EGFR arm with | VCLLNNFYPREAKVQWKVDNALQSGNSQESVTEQDSKDSTY |
| mouse Erbitux VL | SLSSTLTLSKADYEKHIKVYACEVTHQGLSSPVTKSFNRGEC |
| domain) | |
| SEQ ID NO: 176 - | QVQLQESGPGLVKPSETLSLTCVTVSGFSLISYGVHWVRQPPGK |
| BEAT CD38- | GLEWLGVIWRGGSTDYNAAFMSRLTISKDNSKNQVSLKLSSV |
| HB7bestfit/CD3(SP34) | TAADTAVYFCAKTLITTGYAMDYWGQGTLVTVSSASTKGPS |
| antibody FAB heavy | VFPLAPSSKSTSGGTAALGCLVKDYFPEPVTVSWNSGALTSG |
| chain (CD38 arm - | VHTFPAVLQSSGLYSLSSVVTVPSSSLGTQTYICNVNHKPSNT |
| humanized HB-7 best- | KVDKKVEPKSCDKTHTCPPCPAPEAAGGPSVFLFPPKPKDTL |
| fit) | MISRTPEVTCVVVDVSHEDPEVQFKWYVDGVEVHNAKTKPR |
| | EEQYNSTFRVVSVLTVLHQDWLNGKEYKCKVSNKALPAPIE |
| | KTISKTIKGQPREPAVYTLPPSREEMTKNQVKLVCLVTGFYPS |
| | DIAVEWESSGQPENNYYTTPPMLDSDGSFSLVSWLNVDKSR |
| | WQQGNIFSCSVMHEALHNRFTQKSLSLSPGK |
| SEQ ID NO: 177 - | EVQLVESGGGLVQPGGSLKLSCAASGFTFNKYAMNWVRQAP |
| BEST CD38- | GKGLEWVARIRSKYNNYATYYADSVKDRFTISRDDSKNTAY |
| HB7bestfit/CD3(SP34) | LQMNNLKTEDTAVYYCVRHGNFGNSYISYWAYWGQGTLVT |
| antibody scFv heavy | VSSGGGGSGGGGSGGGGSQTVVTQEPSLTVSPGGTVTLTCGS |
| chain (CD3 arm - | STGAVTSGNYPNWVQQKPGQAPRGLIGGTKFLAPGTPARFSG |
| humanized SP34 | SLLGGKAALTLSGVQPEDEAEYYCVLWYSNRWVFGGGTKLT |
| VH/VL domains from | VLGGGGGTDKTHTCPPCPAPEAAGGPSVFLFPPKPKDTLMISR |
| WO2008/119565) | TPEVTCVVVDVSHEDPEVKFNWYVDGVEVHNAKTKPREEQY |
| | NSTYRVVSVLTVLHQDWLNGKEYKCKVSNKALPAPIEKTISK |
| | AKGQPREPEVATFPPSRDELTKNQVTLVCLVTGFYPSDIAVE |
| | WESNGQPENNYKTDPPLLESQGSFALSSRLRVDKSRWQQGN |
| | VFSCSVMHEALHNHYTQKSLSLSPGK |
| SEQ ID NO: 178 - | QVTLKESGPTLVKPTQTLTLTCTFSGLSLSTSGKGVGWIRQPP |
| BEAT CD38- | GKALEWLAHIWWDDDKRYNPALKSRLTITKDTSKNQVVLT |
| 9G7bestfit/CD3(SP34) | MTNMDPVDTATYYCARIELGRSYVMDYWGQGTLVTVSSAS |
| antibody FAB heavy | TKGPSVFPLAPSSKSTSGGTAALGCLVKDYFPEPVTVSWNSG |
| chain (CD38 arm - | ALTSGVHTFPAVLQSSGLYSLSSVVTVPSSSLGTQTYICNVNH |
| humanized 9G7 best-fit | KPSNTKVDKKVEPKSCDKTHTCPPCPAPEAAGGPSVFLFPPKP |
| VH) | KDTILMISRTPEVTCVVVDVSHEDPEVQFKWYVDGVEVHNAK |
| | TKPREEQYNSTFRVVSVLTVLHQDWLNGKEYKCKVSNKALP |
| | APIEKTISKTKGQPREPAVYTLPPSREEMTKNQVKLVCLVTGF |
| | YPSDIAVEWESSGQPENNYYTTPPMLDSDGSFSLVSWLNVDK |
| | SRWQQGNIFSCSVMHEALHNRFTQKSLSLSPGK |
| SEQ ID NO: 179 - | EVQLVESGGGLVQPGGSLRLSCAASGFTFNTYAMNWVRQAP |
| BEAT CD38- | GKGLEWVARIRSKYNNYATYYADSVKGRFTISRDDSKNTLY |
| 9G7bestfit/CD4SP34- | LQMNSLRAEDTAVYYCVRHGNFGNSYVSWFAYWGQGTTVT |
| Kappa2) antibody scFv | VSSGGGGSGGGGSGGGGSEIVVTQSPATLSVSPGERATLSCRS |
| heavy chain (CD3 arm - | STGAVTTSNYANWVQEKPGQAFRGLIGGANKRAPGVPARFS |
| humanized SP34 | GSLSGDXATLTISSLQSEDFAVYYCALWYSNLWVFGQGTKLE |
| VH5/VL32) | IKGGGGTDKTHTCPPCPAPEAAGGPSVFLFPPKPKDTLMISRT |
| | PEVTCVVVDVSHEDPEVKFNWYVDGVEVHNAKTKPREEQY |
| | NSTYRVVSVLTVLHQDWLNGKEYKCKVSNKALPAPIEKTISK |
| | AKGQPREPEVATFPPSRDELTKNQVTLVCLVTGFYPSDIAVE |
| | WESNGQPENNYKTDPPLLESQGSFALSSRLRVDKSRWQQGN |
| | VFSCSVMHEALHNHYTQKSLSLSPGK |
| SEQ ID NO: 180 - | QVQLQQPGAELVKPGASVKMSCKASGYTFTSYNMHWVKQT |
| BEAT CD20/CD3 | PGRGLEWIGAIYPGNGDTSYNQKFKGKATLTADKSSSTAYM |
| antibody FAB heavy | QLSSLTSEDSAVYYCARSTYYGGDWYFNVWGAGTTVTVSAA |
| chain | STKGPSVFPLAPSSKSTSGGTAALGCLVKDYFPEPVTVSWNSG |
| | ALTSGVHTFPAVLQSSGLYSLSSVVTVPSSSLGTQTYICNVNH |
| | KPSNTKVDKKVEPKSCDKTHTCPPCPAPEAAGGPSVFLFPPKP |
| | KDTLMISRTPEVTCVVVDVSHEDPEVQFKWYVDGVEVHNAK |
| | TKPREEQYNSTFRVVSVLTVLHQDWLNGKEYKCKVSNKALP |
| | APIEKTISKTKGQPREPAVYTLPPSREEMTKNQVKLVCLVTGF |
| | YPSDIAVEWESSGQPENNYYTTPMLDSDGSFSLVSWLNVDK |
| | SRWQQGNIFSCSVMHEALHNRFTQKSLSLSPGK |
| SEQ ID NO: 181 - | QIVLSQSPAILSASPGEKVTMETTCRASSSVSYIHWFQQKPGSS |
| BEAT CD20/CD3 | PKPWIYATSNLASGYPVRFSGSGSGTSYSLTISRVEAEDAATY |
| antibody FAB light | YCQQWTSNPPTFGGGTKLEIKRTVAAPSVFIFPPSDEQLKSGT |
| chain | ASVVCLLNNFYPREAKVQWKVDNALQSGNSQESVTEQDSKD |
| | STYSTSSTLTLSKADYEKHKVYACEVTHQGLSSPVTKSFNRG |
| | EC |
| SEQ ID NO: 182 - | QVQLQQPGAELVKPGASVKMSCKASGYTFTSYNMHWVKQT |
| Humanized SP34 VH | PGRGLEWIGAIYPGNGDTSYNQKFKGKATLTADKSSSTAVM |
| domain from | QLSSLTSEDSAVYYCARSTYYGGDWYFNVWGAGTTVTVSA |
| WO2008/119565 | |
| SEQ ID NO: 183 - | QVQLQQPGAELVKPGASVKMSCKASGYTFTSYNMHWVKQT |
| Humanized SP34 VL | PGRGLEWIGAIYPGNGDTSYNQKFKGKATLTADKSSSTAVM |
| domain from | QLSSLTSEDSAVYYCARSTYYGGDWYFNVWGAGTTVTVSA |
| WO2008/119565 | |
| SEQ ID NO: 184 - | QSIKGNHLVKVYDYQEDGSVLLTCDAEAKNITWFKDGKMIG |
| Human CD3 gamma | FLTEDKKKWNLGSNAKDPRGMYQCKGSQNKSKPLQVYYRM |
| extracellular region | CQNCIELNAATIS |
| SEQ ID NO. 185 - | DGNEEMGGITQTPYKVSISGTTVILTCPQYPGSEILWQHNDKN |
| Human CD3 epsilon | IGGDEDDKNIGSDEDHLSLKEFSELEQSGYVVCYPRGSKPEDA |
| extracellular region | NFYLYLRARVCENCMEMD |
| SEQ ID NO: 186 - 26- | GSADDAKKDAAKKDDAKKDDAKKDGS |
| residue peptide linker | |
| SEQ ID NO: 187 - | QSIKGNHLVKVYDYQEDGSVLLTCDAEAKNITWFKDGKMIG |
| Human CD3 gamma- | FLTEDKKKWNLGSNAKDPRGMYQCKGSQNKSKPLQVYYRM |
| epsilon-Fc fusion | GSADDAKKDAAKKDDAKKDDAKKDGSQDGNEEMGGITQTP |
| protein | YKVSISGTTVILTCPQYPGSEILWQHNDKNIGGDEDDKNIGSD |
| | EDHLSLKEFSELEQSGYYVCYPRGSKPEDANFYLYLRARVGG |
| | GGTDKTHTCPPCPAPELLGGPSVFLFPPKPKDTLMISRTPEVTC |
| | VVVDVSHEDPEVKFNWYVDGVEVHNAKTKPREEQYNSTYR |
| | VVSVLTVLHQDWLNGKEYKCKVSNKALPAPIEKTISKAKGQP |
| | REPQVYTLPPSRDELTKNQVSLTCLVKGFYPSDIAVEWESNG |
| | QPENNYKTTPPVLDSDGSFFLYSKLTVDKSRWQQGNVFSCSV |
| | MHEALHNHYTQKSLSLSPG |
| SEQ ID NO: 188 - | QDGNEEMGGITQTPYKVSISGTTVIL |
| Human CD3 epsilon 1- | |
| 26 amino acid sequence | |
| SEQ ID NO: 189 - | QDGNEEMGSITQTPYQVSISGTTVIL |
| Cynomolgus monkey | |
| CD3 epsilon 1-26 amino | |
| acid sequence | |
| SEQ ID NO: 190 - | QDGNEEMGGITQTPYKVSISGTTVILGGGGTDKTHTCPPCPAP |
| Human CD3 epsilon 1- | ELLGGPSVFLFPPKPKDTLMISRTPEVTCVVVDVSHEDPEVKF |
| 26 Fc fusion | NWYVDGVEVHNAKTKPREEQYNSTYRVVSVLTVLHQDWLN |
| | GKEYKCKVSNKALPAPIEKTISKAKGQPREPQVYTLPPSRDEL |
| | TKNQVSLTCLVKGFYPSDIAVEWESNGQPENNYKTTPPVLDS |
| | DGSFFLYSKLTVDKSRWQQGNVFSCSVMHEALHNHYTQKSL |
| | SLSPGK |
| SEQ ID NO: 191 - | QDGNEEMGSITQTPYQVSISGTTVILGGGGTDKTHTCPPCPAP |
| Cynomolgus monkey | ELLGGPSVFLFPPKPKDTLMLSRTPEVTCVVVDVSHEDPEVKF |
| CD3 epsilon 1-26 Fc | NWYVDGVEVHNAKTKPREEQYNSTYRVVSVLTVLHQDWLN |
| fusion | GKEYKCKVSNKALPAPIEKTISKAKGQPREPQVYTLPPSRDEL |
| | TKNQVSLTCLVKGFYPSDIAVEWESNGQPENNYKTTPPVLDS |
| | DGSFFLYSKLTVDKSRWQQGNVFSCSVMHEALHNHYTQKSL |
| | SLSPGK |
| SEQ ID NO: 192 - | VPRWRQOWSGPGTTKRFPETVLARCVKYTEIHPEMRHVDCQ |
| Human CD38 | SVWDAFKGAFISKHPCNITEEDYQPLMKLGTQTVPCNKILLW |
| extracellular region | SRIKDLAHQFTQVQRDMFTLEDTLLGYLADDLTWCGEFNTSK |
| fused to a polyhistine | INYQSCPDWRKDCSNNPVSVFWKTVSRRFAEAACDVVHVML |
| tag - amino acid | NGSRSKIFDKNSTFGSVEVHNLQPEKVQTLEAWVIHGGREDS |
| sequence | RDLCQDPTIKELESIISKRNIQFSCKNIYRPDKFLQCVKNPEDSS |
| | CTSEIHHHHHH |
| SEQ ID NO: 193 - | VPRWRQQWSGSGTTSRFPETVLARCVKYTEVHPEMRHVDCQ |
| Cynomolgus monkey | SVWDAFKGAFISKYPCNITEEDYQPLVKLGTQTVPCNKTLLW |
| CD38 extracellular | SRIKDLAHQFTQVQRDMFTLEDMLLGYLADDLTWCGEFNTF |
| region fused to a | EINYQSCPDWRKDCSNNPVSVFWKTVSRRFAETACGVVHVM |
| polyhistine tag - amino | LNGSRSKIFDKNSTFGSVEVHNLQPEKVQALEAWVIHGGRED |
| acid sequence | SRDLCQDPTIKELESIISKRNIRFFCKNIYRPDKFLQCVKNPEDS |
| | SCLSGIHHHHHH |
| SEQ ID NO: 194 - | GYTFTRYT |
| Mouse anti- human CD3 | |
| epsilon OKT3 CDR H1 | |
| SEQ ID NO: 195 - | INPSRGYT |
| Mouse anti- human CD3 | |
| epsilon OKT3 CDR H2 | |
| SEQ ID NO: 196 - | ARYYDDHYCLDY |
| Mouse anti- human CD3 | |
| epsilon OKT3 CDR H3 | |
| SEQ ID NO: 197 - | SSVSY |
| Mouse anti- human CD3 | |
| epsilon OKT3 CDR L1 | |
| SEQ ID NO: 198 - | DTS |
| Mouse anti- human CD3 | |
| epsilon OKT3 CDR L2 | |
| SEQ ID NO: 199 - | QQWSSNPPT |
| Mouse anti- human CD3 | |
| epsilon OKT3 CDR L3 | |
| SEQ ID NO: 200 - | GFTFNTYA |
| Mouse anti- human CD3 | |
| epsilon SP34 CDR H1 | |
| SEQ ID NO: 201 - | IRSKYNNYAT |
| Mouse anti- human CD3 | |
| epsilon SP34 CDR H2 | |
| SEQ ID NO: 202 - | VRHGNFGNSYVSWFAY |
| Mouse anti- human CD3 | |
| epsilon SP34 CDR H3 | |
| SEQ ID NO: 203 - | TGAVTTSNY |
| Mouse anti- human CD3 | |
| epsilon SP34 CDR L1 | |
| SEQ ID NO: 204 - | GTN |
| Mouse anti- human CD3 | |
| epsilon SP34 CDR L2 | |
| SEQ ID NO: 205 - | ALWYSNLWV |
| Mouse anti- human CD3 | |
| epsilon SP34 CDR L3 | |
| SEQ ID NO: 206 - | GFNIKDTY |
| Herceptin | |
| (trastuzumab)CDR H1 | |
| SEQ ID NO: 207 - | IYPTNGYT |
| Herceptin (trastuzumab) | |
| CDR H2 | |
| SEQ ID NO: 208 - | SRWGGDGFYAMDY |
| Herceptin (trastuzumab) | |
| CDR H3 | |
| SEQ ID NO: 209 - | QDVNTA |
| Herceptin (trastuzumab) | |
| CDR L1 | |
| SEQ ID NO: 210 - | SAS |
| Herceptin (trastuzumab) | |
| CDR L2 | |
| SEQ ID NO: 211 - | QQHYTTPPT |
| Herceptin (trastuzumab) | |
| CDR L3 | |
| SEQ ID NO: 212 - | GFSLISYG |
| Mouse anti- human | |
| CD38 HB-7 CDR H1 | |
| SEQ ID NO: 213 - | IWRGGST |
| Mouse anti- human | |
| CD38 HB-7 CDR H2 | |
| SEQ ID NO: 214 - | AKTLITTGYAMDY |
| Mouse anti- human | |
| CD38 HB-7 CDR H3 | |
| SEQ ID NO: 215 - | EDIYNR |
| Mouse anti- human | |
| CD38 HB-7 CDR L1 | |
| SEQ ID NO: 216 - | GAT |
| Mouse anti- human | |
| CD38 HB-7 CDR L2 | |
| SEQ ID NO: 217 - | QQYWSTPT |
| Mouse anti- human | |
| CD38 HB-7 CDR L3 | |
| SEQ ID NO: 218 - | GFDFSRSW |
| Mouse anti- human | |
| CD38 OKT10 CDR H1 | |
| SEQ ID NO: 219 - | INPDSSTI |
| Mouse anti- human | |
| CD38 OKT10 CDR H2 | |
| SEQ ID NO: 220 - | ARYGNWFPY |
| Mouse anti- human | |
| CD38 OKT10 CDR H3 | |
| SEQ ID NO: 221 - | QNVDTN |
| Mouse anti- human | |
| CD38 OKT10 CDR L1 | |
| SEQ ID NO: 222 - | SAS |
| Mouse anti- human | |
| CD38 OKT10 CDR L2 | |
| SEQ ID NO: 223 - | QQYDSYPLTFGAGTK |
| Mouse anti- human | |
| CD38 OKT10 CDR L3 | |
| SEQ ID NO: 224 - | GLSLSTSGKG |
| Mouse anti- human | |
| CD38 9G7 CDR H1 | |
| SEQ ID NO: 225 - | IWWDDDK |
| Mouse anti- human | |
| CD38 9G7 CDR H2 | |
| SEQ ID NO: 226 - | ARIELGRSYVMDY |
| Mouse anti- human | |
| CD38 9G7 CDR H3 | |
| SEQ ID NO: 227 - | QDVITS |
| Mouse anti- human | |
| CD38 9G7 CDR L1 | |
| SEQ ID NO: 228 - | SAS |
| Mouse anti- human | |
| CD38 9G7 CDR L2 | |
| SEQ ID NO: 229 - | QQHYTIPLT |
| Mouse anti- human | |
| CD38 9G7 CDR L3 | |
| SEQ ID NO: 230 - | GFTFSSYW |
| Human anti- human | |
| CD38 767 CDR H1 | |
| SEQ ID NO: 231 - | IKQDGSEK |
| Human anti- human | |
| CD38767 CDR H2 | |
| SEQ ID NO: 232 - | AREGRTGYFDY |
| Human anti- human | |
| CD38767 CDR H3 | |
| SEQ ID NO: 233 - | TSNIGTNY |
| Human anti- human | |
| CD38767 CDR L1 | |
| SEQ ID NO: 234 - | RND |
| Human anti- human | |
| CD38767 CDR L2 | |
| SEQ ID NO: 235 - | AAWDDSRSGVYA |
| Human anti- human | |
| CD38767 CDR L3 | |
| SEQ ID NO: 236 - | GFSLSTSGMG |
| Mouse anti-human | |
| OX40 CDR H1 from | |
| WO2013/008171 | |
| SEQ ID NO: 237 - | IWWDDDK |
| Mouse anti-human | |
| OX40 CDR H2 from | |
| WO2013/008171 | |
| SEQ ID NO: 238 - | ARIDWDGFAY |
| Mouse anti-human | |
| OX40 CDR H3 from | |
| WO2013/008171 | |
| SEQ ID NO: 239 - | SSVSY |
| Mouse anti-human | |
| OX40 CDR L1 from | |
| WO2013/008171 | |
| SEQ ID NO: 240 - | ATS |
| Mouse anti-human | |
| OX40 CDR L2 from | |
| WO2013/008171 | |
| SEQ ID NO: 241 - | QQWSSNPWT |
| Mouse anti-human | |
| OX40 CDR L3 from | |
| WO2013/008171 | |
| SEQ ID NO: 242 - | GYTFTSYN |
| Rituxan (rituxitnab) | |
| CDR H1 | |
| SEQ ID NO: 243 - | IYPGNGDT |
| Rituxan (rituximab) | |
| CDR H2 | |
| SEQ ID NO: 244 - | ARSTYYGGDWYFNV |
| Rituxan (rituximab) | |
| CDR H3 | |
| SEQ ID NO: 245 - | ASSSVSY |
| Rituxan (rituximab) | |
| CDR L1 | |
| SEQ :ID NO: 246 - | ATS |
| Rituxan (rituximab) | |
| CDR L2 | |
| SEQ ID NO: 247 - | QQWTSNPPT |
| Rituxan (rituximab) | |
| CDR L3 | |
| SEQ ID NO: 248 - | GFSLTNYG |
| Erbitux (cetuximab) | |
| CDR H1 | |
| SEQ ID NO: 249 - | IWSGGNT |
| Erbitux (cetuximab) | |
| CDR H2 | |
| SEQ ID NO: 250 - | ARALTYYDYEFAY |
| Erbitux (cetuximab) | |
| CDR H3 | |
| SEQ ID NO: 251 - | QSIGTN |
| Erbitux (cetuximab) | |
| CDR L1 | |
| SEQ ID NO: 252 - | YAS |
| Erbitux (cetuximab) | |
| CDR L2 | |
| SEQ ID NO: 253 - | QQNNNWPTT |
| Erbitux (cetuximab) | |
| CDR L3 | |
| SEQ ID NO: 254 - | GGSVSSGDYY |
| Vectibix (panitumumab) | |
| CDR H1 | |
| SEQ ID NO: 255 - | IYYSGNT |
| Vectibix (panitumumab) | |
| CDR H2 | |
| SEQ ID NO: 256 - | VRDRVTGAFDI |
| Vectibix (panitumumab) | |
| CDR H3 | |
| SEQ ID NO: 257 - | QDISNY |
| Vectibix (panitumumab) | |
| CDR L1 | |
| SEQ ID NO: 258 - | DAS |
| Vectibix (panitumumab) | |
| CDR L2 | |
| SEQ ID NO: 259 - | QHFDHLPLA |
| Vectibix (panitumumab) | |
| CDR L3 | |
| SEQ ID NO: 260 - | GVSLPDYG |
| Mouse anti-human | |
| CD19 CDR H1 from | |
| WO2010/095031 | |
| SEQ ID NO: 261 - | IWGSETT |
| Mouse anti-human | |
| CD19 CDR H2 from | |
| WO2010/095031 | |
| SEQ ID NO: 262 - | AKHYYYGGSYAMDY |
| Mouse anti-human | |
| CD19 CDR H3 from | |
| WO2010/095031 | |
| SEQ ID NO: 263 - | QDISKY |
| Mouse anti-human | |
| CD19 CDR L1 from | |
| WO2010/095031 | |
| SEQ ID NO: 264 - | HTS |
| Mouse anti-human | |
| CD19 CDR L2 from | |
| WO2010/095031 | |
| SEQ ID NO: 265 - | QQGATLPYT |
| Mouse anti-human | |
| CD19 CDR L3 from | |
| WO2010/095031 | |
| SEQ ID NO: 266 - | GFTFSSYA |
| Bsw17 CDR H1 | |
| SEQ 1D NO: 267 - | ISSGNII |
| Bsw17 CDR H2 | |
| SEQ ID NO: 268 - | TRGRSTYGGFDH |
| Bsw17 CDR H3 | |
| SEQ ID NO: 269 - | SSVTF |
| Bsw17 CDR L1 | |
| SEQ ID NO: 270 - | DTS |
| Bsw17 CDR L2 | |
| SEQ ID NO: 271 - | QHWSGNPLT |
| Bsw17 CDR L3 | |
| SEQ ID NO: 272 - | GYSITSGYS |
| Omalizumab CDR H1 | |
| SEQ ID NO: 273 - | ITYDGST |
| Omalizumab CDR H2 | |
| SEQ ID NO: 274 - | ARGSHYFGHWHFAV |
| Omalizumab CDR H3 | |
| SEQ ID NO: 275 - | QSVDYDGDSY |
| Omalizumab CDR L1 | |
| SEQ ID NO: 276 - | AAS |
| Omalizumab CDR L2 | |
| SEQ ID NO: 277 - | QQSHEDPYT |
| Omalizumab CDR L3 | |
| SEQ 1D NO: 278 - | EVQLVESGGGLVQPGGSLRLSCAASGFSTSTSGMGMSWVRQ |
| Humanized anti- | APGKGLEWVSAIWWDDDKYYADSVKGRFTISRDNSKNTLYL |
| OX40/mingraft VH | QMNSLRAEDTAVYYCARIDWDGFAYWGQGTLVTVSS |
| domain | |
| SEQ ID NO: 279- | EVQLVESGGGLVQPGGSLRLSCAFSGFSLSTSGMGVGWIRQA |
| Humanized anti- | PGKGLEWLAHIWWDDDKYYNTALKSGLTISKDTSKNTVYLQ |
| OX40/maxgraft VH | MNSLRAEDTAVYYCARIDWDGFAYWGQGTLVTVSS |
| domain | |
| SEQ ID NO: 280 - | DIQMTQSPSSLSASVGDRVTITCRASSSVSYLNWYQQKPGKA |
| Humanized anti- | PKLLIYATSSLQSGVPSRFSGSGSGTDFTLTISSLQPEDFATYYC |
| OX40/mingraft VL | QQWSSNPWTFGQGTKVEIK |
| domain | |
| SEQ ID NO: 281 - | DIQLTQSPSSLSASVGDRVTITCRASSSVSYMHWYQQKPGKA |
| Humanized anti- | PKPWIYATSNLASGVPSRFSGSGSGTDYTLTISSLQPEDFATYY |
| OX40/maxgraft VL | CQQWSSNPWTFGQGTKVEIK |
| domain | |
| SEQ ID NO: 282 - | EVQLVESGGGLVQPGGSLRLSCAASGYTFTSYNMSWVRQAP |
| Humanized | GKGLEWVSAIYPGNGDTYYADSVKGRFTISRDNSKNTLYLQ |
| Rituximab/mingraft VH | MNSLRAEDTAVYYCARSTYYGGDWYFNVWGQGTLVTVSS |
| domain | |
| SEQ ID NO: 283 - | EVQLVESGGGLVQPGGSLRLSCAASGYTFTSYNMSWVRQAP |
| Humanized | GKGLEWIGAIYPGNGDTYYADSVKGRATLSADKSKNTAYLQ |
| Rituximab/maxgraft VH | MNSLRAEDTAVYYCARSTYYGGDWYFNVWGQGTLVTVSS |
| domain | |
| SEQ ID NO: 284 - | DIQMTQSPSSLSASVGDRVTITCRASASSSVSYLNWYQQKPG |
| Humanized | KAPKLLIYATSSLQSGVPSRFSGSGSGTDFTLTISSLQPEDFAT |
| Rituximab/mingraft VL | YYCQQWTSNPPTFGQGTKVEIK |
| domain | |
| SEQ ID NO: 285 - | DIQLTQSPSSLSASVGDRVITCRLSASSSVSYLNWFQQKPGK |
| Humanized | APKPWIYATSSLQSGVPSRFSGSGSGTDYTLTISSLQPEDFATY |
| Rituximab/maxgraft VL | YCQQWTSNPPTFGQGTKVEIK |
| domain | |
| SEQ ID NO: 286 - | EVQLVESGGGLVQPGGSLRLSCAASGFSLTNYGMSWVRQAP |
| Humanized | GKGLEWVSAIWSGGNTYYADSVKGRFTISRDNSKNTLYLQM |
| Erbitux/mingraft VH | NSLRAEDTAVYYCARALTYYDYEFAYWGQGTLVTVSS |
| domain | |
| SEQ ID NO: 287 - | EVQLVESGGGLVQPGGSLRLSCAASGFSLTNYGVHWVRQAP |
| Humanized | GKGLEWLGAIWSGGNTDYNTPFTGRLTISKDNSKNTLYLQM |
| Erbitux/maxgraft VH | NSLRAEDTAVYYCARALTYYDYEFAYWGQGTLVTVSS |
| domain | |
| SEQ ID NO: 288 - | DIQMTQSPSSLSASVGDRVTITCRASQSIGTNLNWYQQKPGK |
| Humanized | APKLLIYYASSLQSGVPSRFSGSGSGTDFTLTISSLQPEDFATY |
| Erbitux/mingraft VL | YCQQNNNWPTTFGQGTKVEIK |
| domain | |
| SEQ ID NO: 289 - | DIQLTQSPSSLSASVGDRVTITCRASQSIGTNIHWYQQKPGKA |
| Humanized | PKLLIKYASESISGVPSRFSGSGSGTDFTLTISSLQPEDFATYYC |
| Erbitux/maxgraft VL | QQNNNWPTTGGQGTKVEIK |
| domain | |
| SEQ ID NO: 290 - | QVQLQESGPGLVKPSETLSLTCTVSGGSVSSGDYYWTWIRQS |
| Vectibix VH domain | PGKGLEWIGHIYYSGNTNYNPSLKSRLTISIDTSKTQFSLKLSS |
| | VTAADTAIYYCVRDRVTGAFDIWGQGTMVTVSS |
| SEQ ID NO: 291 - | DIQMTQSPSSLSASVGDRVTITCQASQDISNYLNWYQQKPGK |
| Vectibix VL domain | APKLLIYDASNLETGVPSRFSGSGSGTDFTFTISSLQPEDIATYF |
| | CQHFDHLPLAFGGGTKVEIK |
| SEQ ID NO: 292 - | EVQLVESGGGLVQPGGSLRLSCAASGGSVSSGDYYMSWVRQ |
| Humanized | APGKGLEWVSAIYYSGNTYYADSVKGRFTISRDNSKNTLYLQ |
| Vectiblx/mingraft VH | MNSLRAEDTAVYYCVRDRVTGAFDIWGQGTLVTVSS |
| domain | |
| SEQ ID NO: 293 - | EVQLVESGGGLVQPGGSLRLSCAVSGGSVSSGDYYMSWVRQ |
| Humanized | APGKGLEWIGAIYYSGNTYYADSVKGRLTISIDTSKNTFYLQ |
| Vectiblx/maxgraft VH | MNSLRAEDTAVYYCVRDRVTGAFDIWGQGTLVTVSS |
| domain | |
| SEQ ID NO: 294 - | DIQMTQSPSSLSASVGDRVTITCRASQDISNYLNWYQQKPGK |
| Humanized | APKLLIYDASSLQSGVPSRFSGSGSGTDFTLTISSLQPEDFATY |
| Vectiblx/mingraft VL | YCQHFDHLPLAFGQGTKVEIK |
| domain | |
| SEQ ID NO: 295 - | DIQMTQSPSSLSASVGDRVTITCQASQDISNYLNWYQQKPGK |
| Humanized | APKLLIYDASNLETGVPSRFSGSGSGTDFTFTISSLQPEDIATYF |
| Vectibix/maxgraft VL | CQHFDHLPLAFGGGTKVEIK |
| domain | |
| SEQ ID NO: 296 - anti- | QVQLVQSGGGVVQPGRSLRLSCAASGVSLPDYGVSWVRQAP |
| human CD19 VH | GKGLEWVAVIWGSETTYYNSALKSRFTISRDNSKNTLYLQM |
| domain from | NSLRAEDTAVYYCAKHYYYGGSYAMDYWGQGTLVTVSS |
| WO2010/095031 | |
| SEQ ID NO: 297 - anti- | DIQMTQSPSSLSASVGDRVTITCRASQDISKYLNWYQQKPGK |
| human CD19 VL | AIKLLIYHTSRLHSGVPSRFSGSGSGTDFTLTISSLQPEDFATYY |
| domain from | CQQGATLPYTFGPGTKVDIK |
| WO2010/095031 | |
| SEQ ID NO: 298 - | EVQLVESGGGLVQPGGSLRLSCAVSGYSITSGYSWNWIRQAP |
| Omalizumab VH | GKGLEWVASITYDGSTNYADSVKGRFTISRDDSKINTFYLQMN |
| domain | SLRAEDTAVYYCARGSHYFGHWHFAVWGQGTLVTVSS |
| SEQ ID NO: 299 - | DIQLTQSPSSLSASVGDRVTITCRASQSVDYDGDSYMNWYQQ |
| Omalizumab VL | KPGKAPKLLIYAASYLESGVPSRFSGSGSGTDFTLTISSLQPED |
| domain | FATYYCQQSHEDPYTFGQGTKVEIK |
| SEQ ID NO: 300 - | EVQLVESGGGLVQPGGSLRLSCAVSGYSITSGYSWNWIRQAP |
| Stabilized | GKGLEWVASITYDGSTNYADSVKGRFTISRDDSKNTFYLQMN |
| Omalizumab/maxgraft | SLRAEDTAVYYCARGSHYFGHWHFAVWGQGTLVTVSS |
| VH domain | |
| SEQ ID NO: 301 - | EVQLVESGGGLVQPGGSLRLSCAASGYSITSGYSMSWVRQAP |
| Stabilized | GKGLEWVSAITYDGSTYYADSVKGRFTISRDNSKNTLYLQM |
| Omalizumab/mingraft | NSLRAEDTAVYYCARGSHYFGHWHFAVWGQGTLVTVSS |
| VH domain | |
| SEQ ID NO: 302 - | DIQLTQSPSSLSASVGDRVTITCRASQSVDYDGDSYMNWYQQ |
| Stabilized | KPGKAPKLLIYAASYLESGVPSRFSGSGSGTDFTLTISSLQPED |
| Omalizumab/maxgraft | FATYYCQQSHEDPYTFGQGTKVEIK |
| VL domain | |
| SEQ ID NO: 303 - | DIQMTQSPSSLSASVGDRVTITCRASQSVDYDGDSYLNWYQQ |
| Stabilized | KPGKAPKLLIYAASSLQSGVPSRFSGSGSGTDFTLTISSLQPED |
| Omalizumab/mingraft | FATYYCQQSHEDPYTFGQGTKVEIK |
| VL domain | |
| SEQ ID NO: 304 - | EVQLLESGGGFVKPGGSLKLSCVVSGFTFSSYAMSWVRQTPE |
| Bsw17 mouse VH | KRLEWVASISSGNIIYYPDNVKGRFTISRDNVRNILYLQMSSL |
| domain | RSEDTAMYYCTRGRSTYGGFDHWGQGTTLTVSS |
| SEQ ID NO: 305 - | ELVMTQSPAIMSASPGEKVTMTCSASSSVTFIHWYRQKSGTSP |
| Bsw17 mouse VL | KGWIYDTSKLASGVPARFSGSGSGTSYSLTISTMEAEDAATY |
| domain | YCQHWSGNPLTFGTGTKLELK |
| SEQ ID NO: 306 - | EVQLVESGGGLVQPGGSLRLSCAASGFTFSSYAMSWVRQAP |
| Humanized | GKGLEWVSAISSGNIIYYADSVKGRFTISRDNSKNTLYLQMNS |
| Bsw17/mingraft VH | LRAEDTAVYYCTRGRSTYGGFDHWGQGTLVTVSS |
| domain | |
| SEQ ID NO: 307 - | EVQLVESGGGLVKPGGSLRLSCAVSGFTFSSYAMSWVRQAP |
| Humanized | GKGLEWVASISSGNIIYYPDNVKGRFTISRDNAKNSLYLQMNS |
| Bsw17/maxgraft VH | LRAEDTAVYYCTRGRSTYGGFDHWGQGTTVTVSS |
| domain | |
| SEQ ID NO: 308 - | DIQMTQSPSSLSASVGDRVTITCRASSSVTFLNWYQQKPGKAP |
| Humanized | KLLIYDTSSLQSGVPSRFSGSGSGTDFTLTISSLQPEDFATYYC |
| Bsw17/mingraft VL | QHWSGNPLTFGQGTKVEIK |
| domain | |
| SEQ ID NO: 309 - | DLQMTQSPSSLSASVGDRVTITCSASSSVTFLNWYQQKPGKA |
| Humanized | PWLLIYDTSSLQSGVPSRFSGSGSGTDYTLTISSMQPEDFATYY |
| Bsw17/maxgraft VL | CQHWSGNPLTFGQGTKVE1K |
| domain | |
| SEQ ID NO: 310 - | EVQLVESGGGLVQPGGSLRLSCAASGFNIKDTYIHWVRQAPG |
| BEAT | KGLEWVARIYPTNGYTRYADSVKSRFTISADTSKNTAYLQMN |
| HER2/CD3(SP34- | SLRAEDTAVYYCSRWGGDGFYAMDYWGQGTLVTVSSASTK |
| Kappa2) antibody FAB | GPSVFPLAPSSKSTSGGTAALGCLVKDYFPEPVTVSWNSGALT |
| heavy chain (anti-HER2 | SGVHTFPAVLQSSGLYSLSSVVTVPSSSLGTQTYICNVNHKPS |
| FAB arm with G65S | NTKVDKKVEPKSCDKTHTCPPCPAPEAAGGPSVFLFPPKPKD |
| substitution BT33 | TLMISRTPEVTCVVVDVSHEDPEVQFKWYVDGVEVHNAKTK |
| LALA) | PREEQYNSTFRVVSVLTVLHQDWLNGKEYKCKVSNKALPAPI |
| | EKTISKTKGQPREPAVYTLPPSREEMTKNQVKLVCLVTGFYPS |
| | DIAVEWESSGQPENNYYTTPPMLDSDGSFSLVSWLNVDKSR |
| | WQQGNIFSCSVMHEALHNRFTQKSLSLSPG |
| SEQ ID NO: 311 - | EVQLVESGGGLVQPGGSLRLSCAASGFTFNTYAMNWVRQAP |
| BEAT antibody scFv | GKGLEWVARIRSKYNNYATYYADSVKGRFTISRDDSKNTLY |
| heavy chain SP34- | LQMNSLRAEDTAVYYCVRHGNFGNSYVSYFAYWGQGTTVT |
| Kappa2(anti-CD3 | VSSGGGGSGGGGSGGGGSEIVVTQSPATLSVSPGERATLSCRS |
| epsilon arm - humanized | STGAVTAANYANWVQEKPGQAFRGLIGGANKRAPGVPARFS |
| SP34 VH5/VL32 BT11 | GSLSGDEATLTISSLQSEDFAVYYCALFYSNLWVFGQGTKLEI |
| LALA) | KGGGGTDKTHTCPPCPAPEAAGGPSVFLFPPKPKDTLMISRTP |
| | EVTCVVVDVSHEDPEVKFNWYVDGVEVHNAKTKPREEQYN |
| | STYRVVSVLTVLHQDWLNGKEYKCKVSNKALPAPIEKTISKA |
| | KGQPREPEVATFPPSRDELTKNQVTLVCLVTGFYPSDIAVEWE |
| | SNGQPENNYKTDPPLLESQGSFALSSRLRVDKSRWQQGNVFS |
| | CSVMHEALHNHYTQKSLSLSPG |
| SEQ ID NO: 312 - | EVQLVESGGGLVQPGGSLRLSCAASGFTFNTYAMNWVRQAP |
| BEAT CD38- | GKGLEWVARIRSKYNNYATYYADSVKGRFTISRDDSKNTLY |
| 9G7bestframwork/CD3 | LQMNSLRAEDTAVYYCVRHGNFGNSYVSWFAYWGQGTTVT |
| (SP34-Kappa2) antibody | VSSASTKGPSVFPLAPSSKSTSGGTAALGCLVKDYFPEPVTVS |
| FAB heavy chain (anti- | WNSGALTSGVHTFPAVLQSSGLYSLSSVVTVPSSSLGTQTYIC |
| CD38 FAB arm with | NVNHKPSNTKVDKKVEPKSCDKTHTCPPCPAPEAAGGPSVFL |
| G65S substitution BT33 | FPPKPKDTLMISRTPEVTCVVVDVSHEDPEVQFKWYVDGVEV |
| LALA) | HNAKTKPREEQYNSTFRVVSVLTVLHQDWLNGKEYKCKVSN |
| | KALPAPIEKTISKTKGQPREPAVYTLPPSREEMTKNQVKLVCL |
| | VTGFYRSDIAVEWESSGQPENNYYTTPPMLDSDGSFSLVSWL |
| | NVDKSRWQQGNIFSCSVMHEALHNRFTQKSLSLSPG |
| SEQ ID NO: 313 - | EVQLVESGGGLVQPGGSLKLSCAASGFTFNKYAMNWVRQAP |
| BEAT CD38- | GKGLEWVARIRSKYNNYATYYADSVKDRFTISRDDSKNTAY |
| 767/CD3(SP34-Kappa2) | LQMNNLKTEDTAVYYCVRHGNFGNSYISYWAYWGQGTLVT |
| antibody FAB heavy | VSSASTKGPSVFPLAPSSKSTSGGTAALGCLVKDYFPEPVTVS |
| chain (anti-CD38 FAB | WNSGALTSGVHTFPAVLQSSGLYSLSSVVTVPSSSLGTQTYIC |
| arm with G65S | NVNHKPSNTKVDKKVEPKSCDKTHTCPPCPAPEAAGGPSVFL |
| substitution BT33 | FPPKPKDTLMISRTPEVTCVVVDVSHEDPEVQFKWYVDGVEV |
| LALA) | HNAKTKPREEQYNSTFRVVSVLTVLHQDWLNGKEYKCKVSN |
| | KALPAPIEKTISKTKGQPREPAVYTLPPSREEMTKNQVKLVCL |
| | VTGFYPSDIAVEWESSGQPENNYYTTPPMLDSDGSFSLVSWL |
| | NVDKSRWQQGNIFSCSVMHEALHNRFTQKSLSLSPG |
| SEQ ID NO: 314 - | EVQLVESGGGLVQPGGSLRLSCAFSGFSLSTSGMGVGWIRQA |
| BEAT | PGKGLEWLAHIWWDDDKYYNTALKSGLTISKDTSKNTVYLQ |
| OX40maxgraft/CD3 | MNSLRAEDTAVYYCARIDWDGFAYWGQGTLVTVSSASTKGP |
| (SP34-Kappa2) antibody | SVFPLAPSSKSTSGGTAALGCLVKDYFPEPVTVSWNSGALTSG |
| FAB heavy chain (anti- | VHTFPAVLQSSGLYSLSSVVTVPSSSLGTQTYICNVNHKPSNT |
| OX40 maxgraft FAB | KVDKKVEPKSCDKTHTCPPCPAPEAAGGPSVFLFPPKPKDTL |
| arm with G65S | MISRTPEVTCVVVDVSHEDPEVQFKWYVDGVEVHNAKTKPR |
| substitution BT33 | EEQYNSTFRVVSVLTVLHQDWLNGKEYKCKVSNKALPAPIE |
| LALA) | KTISKTKGQPREPAVYTLPPSREEMTKNQVKLVCLVTGFYPS |
| | DIAVEWESSGQPENNYYTTPPMLDSDGSFSLVSWLNVDKSR |
| | WQQGNIFSCSVMHEALHNRFTQKSLSLSPG |
| SEQ ID NO: 315 - | DIQLTQSPSSLSASVGDRVTITCRASSSVSYMHWYQQKPGKA |
| BEAT | PKPWIYATSNLASGVPSRFSGSGSGTDYTLTISSLQPEDFATYY |
| OX40maxgraft/CD3 | CQQWSSNPWTFGQGTKVEIKRTVAAPSVFIFPPSDEQLKSGTA |
| (SP34-Kappa2) antibody | SVVCLLNNFYPREAKVQWKVDNALQSGNSQESVTEQDSKDS |
| FAB light chain (anti- | TYSLSSTLTLSKADYEKHKVYACEVTHQGLSSPVTKSFNRGE |
| OX40 maxgraft FAB | C |
| arm LC) | |
| SEQ ID NO: 316 - | EVQLVESGGGLVQPGGSLRLSCAASGFSLSTSGMGMSWVRQ |
| BEAT | APGKGLEWVSAIWWDDDKYYADSVKSRFTISRDNSKNTLYL |
| OX40mingraft/CD3 | QMNSLRAEDTAVYYCARIDWDGFAYWCQGTLVTVSSASTK |
| (SP34-Kappa2) antibody | GPSVFPLAPSSKSTSGGTAALGCLVKDYFPEPVTVSWNSGALT |
| FAB heavy chain (anti- | SGVHTFPAVLQSSGLYSLSSVVTVPSSSLGTQTYICNVNHKPS |
| OX40 mingraft FAB | NTKVDKKVEPKSCDKTHTCPPCPAPEAAGGPSVFLFPPKPKD |
| arm with G65S | TLMISRTPEVTCVVVDVSHEDPEVQFKWYVDGVEVHNAKTK |
| substitution BT33 | PREEQYNSTFRVVSVLTVLHQDWLNGKEYKCKVSNKALPAPI |
| LALA) | EKTISKTKGQPREPAVYTLPPSREEMTKNQVKLVCLVTGFYPS |
| | DIAVEWESSGQPENNYYTTPPMLDSDGSFSLVSWLNVDKSR |
| | WQQGNIFSCSVMHEALHNRFTQKSLSLSPG |
| SEQ ID NO: 317 - | DIQMTQSPSSLSASVGDRVTITCRASSSVSYLNWYQQKPGKA |
| BEAT | PKLLIYATSSLQSGVPSRFSGSGSGTDFTLTISSLQPEDFATYYC |
| OX40mingraft/CD3 | QQWSSNPWTFGQGTKVEIKRTVAAPSVFIFPPSDEQLKSGTAS |
| (SP34-Kappa2) antibody | VVCLLNNFYPREAKVQWKVDNALQSGNSQESVTEQDSKDST |
| FAB light chain (anti- | YSLSSTLTLSKADYEKHKVYACEVTHQGLSSPVTKSFNRGEC |
| OX40 mingraft FAB | |
| arm LC) | |
| SEQ ID NO: 318 - | EVQLVESGGGLVQPGGSLRLSCAASGYTFTSYNMSWVRQAP |
| BEAT | GKGLEWIGAIYPGNGDTYYADSVKSRATLSADKSKNTAYLQ |
| CD20maxgraft/CD3 | MNSLRAEDTAVYYCARSTYYGGDWYFNVWGQGTLVTVSSA |
| (SP34-Kappa2) antibody | STKGPSVFPLAPSSKSTSGGTAALGCLVKDYFPEPVTVSWNSG |
| FAB heavy chain (anti- | ALTSGVHTFPAVLQSSGLYSLSSVVTVPSSSLGTQTYICNVNH |
| CD20 maxgraft FAB | KPSNTKVDKKVEPKSCDKTHTCPPCPAPEAAGGPSVFLFPPKP |
| arm with G65S | KDTLMISRTPEVTCVVVDVSHEDPEVQFKWYVDGVEVHNAK |
| substitution BT33 | TKPREEQYNSTFRVVSVLTVLHQDWLNGKEYKCKVSNKALP |
| LALA) | APIEKTISKTKGQPREPAVYTLPPSREEMTKNQVKLVCLVTGF |
| | YPSDIAVEWESSGQPENNYYTTPPMLDSDGSFSLVSWLNVDK |
| | SRWQQGNIFSCSVMHEALHNRFTQKSLSLSPG |
| SEQ ID NO: 319 - | DIQLTQSPSSLSASVGDRVTITCRLSASSSVSYLNWFQQKPGK |
| BEAT | APKPWIYATSSLQSGVPSRFSGSGSGTDYTLTISSLQPEDFATY |
| CD20maxgraft/CD3 | YCQQWTSNPPTFGQGTKVEIKRTVAAPSVFIFPPSDEQLKSGT |
| (SP34-Kappa2) antibody | ASVVCLLNNFYPREAKVQWKVDNALQSGNSQESVTEQDSKD |
| FAB light chain (anti- | STYSLSSTLTLSKADYEKHKVYACEVTHQGLSSPVTKSFNRG |
| CD20 maxgraft FAB | EC |
| arm LC) | |
| SEQ ID NO: 320 - | EVQLVESGGGLVQPGGSLRLSCAASGYTFTSYNMSWVRQAP |
| BEAT | GKGLEWVSAIYPGNGDTYYADSVKSRFTISRDNSKNTLYLQM |
| CD20mingraft/CD3(ST34- | NSLRAEDTAVYYCARSTYYGGDWYFNVWGQGTLVTVSSAS |
| Kappa2) antibody | TKGPSVFPLAPSSKSTSGGTAALGCLVKDYFPEPVTVSWNSG |
| FAB heavy chain (anti- | ALTSGVHTFPAVLQSSGLYSLSSVVTVPSSSLGTQTYICNVNH |
| CD20 mingraft FAB | KPSNTKVDKKVEPKSCDKTHTCPPCPAPEAAGGPSVFLFPPKP |
| arm with G65S | KDTLMISRTPEVTCVVVDVSHEDPEVQFKWYVDGVEVHNAK |
| substitution BT33 | TKPREEQYNSTFRVVSVLTVLHQDWLNGKEYKCKVSNKALP |
| LALA) | APIEKTISKTKGQPREPAVYTLPPSREEMTKNQVKLVCLVTGF |
| | YPSDIAVEWESSGQPENNYYTTPPMLDSDGSFSLVSWLNVDK |
| | SRWQQGNIFSCSVMHEALHNRFTQKSLSLSPG |
| SEQ ID NO: 321 - | DIQMTQSPSSLSASVGDRVTITCRASASSSVSYLNWYQQKPG |
| BEAT | KAPKLLIYATSSLQSGVPSRFSGSGSGTDFTLTISSLQPEDFAT |
| CD20mingraft/CD3 | YYCQQWTSNPPTFGQGTKVEIKRTVAAPSVFIFPPSDEQLKSG |
| (SP34-Kappa2) antibody | TASVVCLLNNFYPREAKVQWKVDNALQSGNSQESVTEQDSK |
| FAB light chain (anti- | DSTYSLSSTLTLSKADYEKHKVYACEVTHQGLSSPVTKSFNR |
| CD20 mingraft FAB | GEC |
| arm LC) | |
| SEQ ID NO: 322 - | EVQLVESGGGLVQPGGSLRLSCAASGFSLTNYGVHWVRQAP |
| BEAT EGFRcetux- | GKGLEWLGAIWSGGNTDYNTPFTSRLTISKDNSKNTLYLQMN |
| maxgraft/CD3(SP34- | SLRAEDTAVYYCARALTYYDYEFAYWGQGTLVTVSSASTKG |
| Kappa2) antibody FAB | PSVFPLAPSSKSTSGGTAALGCLVKDYFPEPVTVSWNSGALTS |
| heavy chain (anti-EGFR | GVHTFPAVLQSSGLYSLSSVVTVPSSSLGTQTYICNVNHKPSN |
| cetuximab maxgraft | TKVDKKVEPKSCDKTHTCPPCPAPEAAGGPSVFLFPPKPKDTL |
| FAB arm with G65S | MISRTPEVTCVVVDVSHEDPEVQFKWYVDGVEVHNAKTKPR |
| substitution BT33 | EEQYNSTFRVVSVLTVLHQDWLNGKEYKCKVSNKALPAPIE |
| LALA) | KTISKTKGQPREPAVYTLPPSREEMTKNQVKLVCLVTGFYPS |
| | DIAVEWESSGQPENNYYTTPPMLDSDGSFSLVSWLNVDKSR |
| | WQQGNIFSCSVMHEALHNRFTQKSLSLSPG |
| SEQ ID NO: 323 - | DIQLTQSPSSLSASVGDRVTITCRASQSIGTNIHWYQQKPGKA |
| BEAT EGFRcetux- | PKLLIKYASESISGVPSRFSGSGSGTDFTLTISSLQPEDFATYYC |
| maxgraft/CD3(SP34- | QQNNNWPTTFGQGTKVEIKRTVAAPSVFIFPPSDEQLKSGTAS |
| Kappa2) antibody FAB | VVCLLNNFYPREAKVQWKVDNALQSGNSQESVTEQDSKDST |
| light chain (anti-EGFR | YSLSSTLTLSKADYEKHKVYACEVTHQGLSSPVTKSFNRGEC |
| cetuximab maxgraft | |
| FAB arm) | |
| SEQ ID NO: 324 - | EVQLVESGGGLVQPGGSLRLSCAASGFSLTNYGMSWVRQAP |
| BEAT EGFRcetux- | GKGLEWVSAIWSGGNTYYADSVKSRFTISRDNSKNTLYLQM |
| mingraft/CD3(SP34- | NSLRAEDTAVYYCARALTYYDYEFAYWGQGTLVTVSSASTK |
| Kappa2) antibody FAB | GPSVFPLAPSSKSTSGGTAALGCLVKDYFPEPVTVSWNSGALT |
| heavy chain (anti-EGFR | SGVHTFPAVLQSSGLYSLSSVVTVPSSSLGTQTYICNVNHKPS |
| cetuximab mingraft | NTKVDKKVEPKSCDKTHTCPPCPAPEAAGGPSVFLFPPKPKD |
| FAB arm with G65S | TLMISRTPEVTCVVVDVSHEDPEVQFKWYVDGVEVHNAKTK |
| substitution BT33 | PREEQYNSTFRVVSVLTVLHQDWLNGKEYKCKVSNKALPAPI |
| LALA) | EKTISKTKGQPREPAVYTLPPSREEMTKNQVKLVCLVTGFYPS |
| | DIAVEWESSGQPENNYYTTPPMLDSDGSFSLVSWLNVDKSR |
| | WQQGNIFSCSVMHEALHNRFTQKSLSLSPG |
| SEQ ID NO: 325 - | DIQMTQSPSSLSASVGDRVTITCRASQSIGTNLNWYQQKPGK |
| BEAT EGFRcetux- | APKLLIYYASSLQSGVPSRFSGSGSGTDFTLTISSLQPEDFATY |
| mingraft/CD3(SP34- | YCQQNNNWPTTFGQGTKVEIKRTVAAPSVFIFPPSDEQLKSGT |
| Kappa2) antibody FAB | ASVVCLLNNFYPREAKVQWKVDNALQSGNSQESVTEQDSKD |
| light chain (anti-EGFR | STYSLSSTLTLSKADYEKHKVYACEVTHQGLSSPVTKSFNRG |
| cetuximab mingraft | EC |
| FAB arm) | |
| SEQ ID NO: 326 - | EVQLVESGGGLVQPGGSLRLSCAVSGGSVSSGDYYMSWVRQ |
| BEAT EGFRpani- | APGKGLEWIGAIYYSGNTYYADSVKSRLTISIDTSKNTFYLQM |
| rnaxgraft/CD3(SP34- | NSLRAEDTAVYYCVRDRVTGAFDIWGQGTLVTVSSASTKGPS |
| Kappa2) antibody FAB | VFPLAPSSKSTSGGTAALGCLVKDYFPEPVTVSWNSGALTSG |
| heavy chain (anti-EGFR | VHTFPAVLQSSGLYSLSSVVTVPSSSLGTQTYICNVNHKPSNT |
| panitumumab maxgraft | KVDKKVEPKSCDKTHTCPPCPAPEAAGGPSVFLFPPKPKDTL |
| FAB arm with G65S | MISRTPEVTCVVVDVSHEDPEVQFKWYVDGVEVHNAKTKPR |
| substitution BT33 | EEQYNSTFRVVSVLTVLHQDWLNGKEYKCKVSNKALPAPIE |
| LALA) | KTISKTKGQPREPAVYTLPPSREEMTKNQVKLVCLVTGFYPS |
| | DIAVEWESSGQPENNYYTTPPMLDSDGSFSLVSWLNVDKSR |
| | WQQGNIFSCSVMHEALHNRFTQKSLSLSPG |
| SEQ ID NO: 327 - | DIQMTQSPSSLSASVGDRVTITCQASQDISNYLNWYQQKPGK |
| BEAT EGFRpani- | APKLLIYDASNLETGVPSRFSGSGSGTDFTFTISSLQPEDIATYF |
| maxgraft/CD3(SP34- | CQHFDHLPLAFGGGTKVEIKRTVAAPSVFIFPPSDEQLKSGTA |
| Kappa2) antibody FAB | SVVCLLNNFYPREAKVQWKVDNALQSGNSQESVTEQDSKDS |
| light chain (anti-EGFR | TYSLSSTLTLSKADYEKHKVYACEVTHQGLSSPVTKSFNRGE |
| panitumumab maxgraft | C |
| FAB arm) | |
| SEQ ID NO: 328 - | EVQLVESGGGLVQPGGSLRLSCAASGGSVSSGDYYMSWVRQ |
| BEAT EGFRpani- | APGKGLEWVSAIYYSGNTYYADSVKSRFTISRDNSKNTLYLQ |
| min graft/CD3(SP34- | MNSLRAEDTAVYYCVRDRVTGAFDIWGQGTLVTVSSASTKG |
| Kappa2) antibody FAB | PSVFPLAPSSKSTSGGTAALGCLVKDYFPEPVTVSWNSGALTS |
| heavy chain (anti-EGFR | GVHTFPAVLQSSGLYSLSSVVTVPSSSLGTQTYICNVNHKPSN |
| panitumumab mingraft | TKVDKKVEPKSCDKTHTCPPCPAPEAAGGPSVFLFPPKPKDTL |
| FAB arm with G65S | MISRTPEVTCVVVDVSHEDPEVQFKWYVDGVEVHNAKTKPR |
| substitution BT33 | EEQYNSTFRVVSVLTVLHQDWLNGKEYKCKVSNKALPAPIE |
| LALA) | KTISKTKGQPREPAVYTLPPSREEMTKNQVKLVCVTGFYPS |
| | DIAVEWESSGQPENNYYTTPPMLDSDGSFSLVSWLNVDKSR |
| | WQQGNIFSCSVMHEALHNRFTQKSLSLSPG |
| SEQ ID NO: 329 - | DIQMTQSPSSLSASVGDRVTITCRASQDISNYLNWYQQKPGK |
| BEAT EGFRpani- | APKLLIYDASSLQSGVPSRFSGSGSGTDFTLTISSLQPEDFATY |
| mingraft/CD3(SP34- | YCQHFDHLPLAFGQGTKVEIKRTVAAPSVFIFPPSDEQLKSGT |
| Kappa2) antibody FAB | ASVVCLLNNFYPREAKVQWKVDNALQSGNSQESVTEQDSKD |
| light chain (anti-EGFR | STYSLSSTLTLSKADYEKHKVYACEVTHQGLSSPVTKSFNRG |
| panitumumab mingraft | EC |
| FAB arm) | |
| SEQ ID NO: 330 - | QVQLVQSGGGVVQPGRSLRLSCAASGVSLPDYGVSWVRQAP |
| BEAT | GKGLEWVAVIWGSETTYYNSALKSRFTISRDNSKNTLYLQM |
| CD19/CD3(SP34- | NSLRAEDTAVYYCAKHYYYGGSYAMDYWGQGTLVTVSSAS |
| Kappa2) antibody FAB | TKGPSVFPLAPSSKSTSGGTAALGCLVKDYFPEPVTVSWNSG |
| heavy chain (anti-CD19 | ALTSGVHTFPAVLQSSGLYSLSSVVTVPSSSLGTQTYICNVNH |
| FAB arm with G65S | KPSNTKVDKKVEPKSCDKTHTCPPCPAPEAAGGPSVFLFPPKP |
| substitution BT33 | KDTLMISRTPEVTCVVVDVSHEDPEVQFKWYVDGVEVHNAK |
| LALA) | TKPREEQYNSTFRVVSVLTVLHQDWLNGKEYKCKVSNKALP |
| | APIEKTISKTKGQPREPAVYTLPPSREEMTKNQVKLVCLVTGF |
| | YPSDIAVEWESSGQPENNYYTTPPMLDSDGSFSLVSWLNVDK |
| | SRWQQGNIFSCSVMHEALHNRFTQKSLSLSPG |
| SEQ ID NO: 331 - | DIQMTQSPSSLSASVGDRVTITCRASQDISKYLNWYQQKPGK |
| BEAT | AIKLLIYHTSRLHSGVPSRFSGSGSGTDFTLTISSLQPEDFATYY |
| CD19/CD3(SP34- | CQQGATLPYTFGPGTKVDIKRTVAAPSVFIFPPSDEQLKSGTA |
| Kappa2) antibody FAB | SVVCLLNNFYPREAKVQWKVDNALQSGNSQESVTEQDSKDS |
| tight chain (anti-CD19 | TYSLSSTLTLSKADYEKHKVYACEVTHQGLSSPVTKSFNRGE |
| FAB arm) | C |
| SEQ ID NO: 332 - | EVQLVESGGGLVQPGGSLRLSCAVSGYSITSGYSWNWIRQAP |
| BEAT IgEomali- | GKGLEWVASITYDGSTNYADSVKSRFTISRDDSKNTFYLQMN |
| maxgraft/CD3(SP34- | SLRAEDTAVYYCARGSHYFGHWHFAVWGQGTLVTVSSAST |
| Kappa2) antibody FAB | KGPSVFPLAPSSKSTSGGTAALGCLVKDYFPEPVTVSWNSGA |
| heavy chain (anti-IgE | LTSGVHTFPAVLQSSGLYSLSSVVTVPSSSLGTQTYICNVNHK |
| omalizumab maxgraft | PSNTKVDKKVEPKSCDKTHTCPPCPAPEAAGGPSVFLFPPKPK |
| FAB arm with G65S | DTMISRTPEVTCVVVDVSHEDPEVQFKWYVDGVEVHNAKT |
| substitution BT33 | KPREEQYNSTFRVVSVLTVLHQDWLNGKEYKCKVSNKALPA |
| LALA) | PIEKTISKTKGQPREPAVYTLPPSREEMTKNQVKLVCLVTGFY |
| | PSDIAVEWESSGQPENNYYTTPPMLDSDGSFSLVSWLNVDKS |
| | RWQQGNIFSCSVMHEALHNRFTQKSLSLSPG |
| SEQ ID NO: 333 - | DIQLTQSPSSLSASVGDRVTITCRASQSVDYDGDSYMNWYQQ |
| BEAT Ighomali- | KPGKAPKLLIYAASYLESGVPSRFSGSGSGTDFTLTISSLQPED |
| maxgraft/CD3(SP34- | FATYYCQQSHEDPYTFGQGTKVEIKRTVAAPSVFIFPPSDEQL |
| Kappa2) antibody FAB | KSGTASVVCLLNNFVPREAKVQWKVDNALQSGNSQESVTEQ |
| light chain (anti-IgE | DSKDSTYSLSSTLTLSKADYEKHKVYACEVTHQGLSSPVTKS |
| omalizumab maxgraft | FNRGEC |
| FAB arm) | |
| SEQ ID NO: 334 - | EVQLVESGGGLVQPGGSLRLSCAASGYSITSGYSMSWVRQAP |
| BEAT IgEomali- | GKGLEWVSAITYDGSTYYADSVKSRFTISRDNSKNTLYLQMN |
| mingraft/CD3(SP34 - | SLRAEDTAVYYCARGSHYFGHWHFAVWGQGTLVTVSSAST |
| Kappa2) antibody FAB | KGPSVFPLAPSSKSTSGGTAALGCLVKDYFPEPVTVSWNSGA |
| heavy chain (anti-IgE | LTSGVHTFPAVLQSSGLYSLSSVVTVPSSSLGTQTYICNVNHK |
| omalizumab mingraft | PSNTKVDKKVEPKSCDKTHTCPPCPAPEAAGGPSVFLFPPKPK |
| FAB arm with G65S | DTLMISRTPEVTCVVVDVSHEDPEVQFKWYVDGVEVHNAKT |
| substitution BT33 | KPREEQYNSTFRVVSVLTVLHQDWLNGKEYKCKVSNKALPA |
| LALA) | PIEKTISKTKGQPREPAVYTLPPSREEMTKNQVKLVCLVTGFY |
| | PSDIAVEWESSGQPENNYYTTPPMLDSDGSFSLVSWLNVDKS |
| | RWQQGNIFSCSVMHEALHNRFTQKSLSLSPG |
| SEQ ID NO: 335 - | DIQMTQSPSSLSASVGDRVTITCRASQSVDYDGDSYLNWYQQ |
| BEAT IgEomali- | KPGKAPKLLIYAASSLQSGVPSRFSGSGSGTDFTLTISSLQPED |
| mingraft/CD3(ISP34- | FATYYCQQSHEDPYTFGQGTKVEIKRTVAAPSVFIFPPSDEQL |
| Kappa2) antibody FAB | KSGTASVVCLLNNFYPREAKVQWKVDNALQSGNSQESVTEQ |
| light chain (anti-IgE | DSKDSTYSLSSTLTLSKADYEKHKVYACEVTHQGLSSPVTKS |
| omalizumab mingraft | FNRGEC |
| FAB arm) | |
| SEQ ID NO: 336 - | EVQLVESGGGLNIKPGGSLRLSCANTSGFTESSYAMS\VVRQAP |
| BEAT IgEbsw17- | GKGLEWVASISSGNIIYYPDNVKSRFTISRDNAKNSLYLQMNS |
| maxgraft/CD3(SP34- | LRAEDIAVYNCTRGRSTYGGEDI-IWGQGTTVTVSSASTKGPS |
| Kappa2) antibody FAB | VFPLAPSSKSTSGGTAALGCLVKDYFPEPVTVSWNSGALTSG |
| heavy chain (anti-IgE | -VITITPAVLQSSGLYSLSSVVTVPSSSLGTQ717YICNVN-HKPSNT |
| omalizumab maxgraft | KVDKKVEPKSCDKTFITCPPCPAPEAAGGPSVFLFPPKPKDTL |
| FAB arm with G65S | MISRTPEVTCVVVDV SHEDPEVQFKWYVDGVEVHNAKTKPR |
| substitution BT33 | EEQYNS7ITRVVSVLTVILFIQD WINGKEYKCKVSNKALPAP 1E |
| LALA) | KTISKTKGQPREPAVYTLPPSREEMTKNQVKINCINTGFYPS |
| | DIAVENVESSGQPENN't'YTT:PPMLDSDGSFSLVSWLNVDKSR |
| | WQQGNIFSCSVMHEALFINRFTQKS LSI SPG |
| SEQ ID NO: 337 - | DLQ Nill'QSPSS ISA S V GDR:VrIII FLN WYQQVGKA |
| BEAT IgEbsw17- | PWLLIYDTSSLQSGVPSRFSGSGSGTDYTLTISSMQPEDFATYY |
| maxgraft/CD3(SP34- | CQFIWSGNPLIFGQGTKVEIKKr VAAPSVFIFITSDEQLKSGTA |
| Kappa2) antibody FAB | SVVCIANNFYPREAKVQWKVDNALQSGNSQESVTEQDSKDS |
| light chain (anti-IgE | TYSLSSTLTLSKADYEKHKVYACEVTHQGLSSPVTKSFNRGE |
| omalizumab maxgraft | C |
| FAB arm) | |
| SEQ ID NO: 338 - | EVQLVESGGGLVQPGGSLRLSCAASGFTFSSYAMSWVRQAP |
| BEAT IgEbsw17- | GKGLEWVSAISSGNIIYYADSVKSRFTISRDNSKNTLYLQMNS |
| mingraft/CD3(SP34- | LRAEDTAVYYCTRGRSTYGGFDHWGQGTLVTVSSASTKGPS |
| Kappa2) antibody FAB | VFPLAPSSKSTSGGTAALGCLVKDYFPEPVTVSWNSGALTSG |
| heavy chain (anti-IgE | VHTFPAVLQSSGLYSLSSVVTVPSSSLGTQTYICNVNHKPSNT |
| omalizumab mingraft | KVDKKVEPKSCDKTHTCPPCPAPEAAGGPSVFLFPPKPKDTL |
| FAB arm with G65S | MISRTPEVTCVVVDVSHEDPEVQFKWYVDGVEVHNAKTKPR |
| substitution BT33 | EEQYNSTFRVVSVLTVLHQDWLNGKEYKCKVSNKALPAPIE |
| LALA) | KTISKTKGQPREPAVYTLPPSREEMTKNQVKLVCLVTGFYPS |
| | DIAVEWESSGQPENNYYTTPPMLDSDGSFSLVSWLNVDKSR |
| | WQQGNIFSCSVMHEALHNRFTQKSLSLSPG |
| SEQ ID NO: 339 - | DIQMTQSPSSLSASVGDRVITCRASSSVTFLNWYQQKPGKAP |
| BEAT IgEbsw17- | KLLIYDTSSLQSGVPSRFSGSGSGTDFTLTISSLQPEDFATYYC |
| mingraft/CD3(SP34- | QHWSGNPLTFGQGTKVEIKRTVAAPSVFIFPPSDEQLKSGTAS |
| Kappa2) antibody FAB | VVCLLNNFYPREAKVQWKVDNALQSGNSQESVTEQDSKDST |
| tight chain (anti-IgE | YSLSSTLTLSKADYEKHKVYACEVTHQGLSSPVTKSFNRGEC |
| omalizumab mingraft | |
| FAB arm) | |
| SEQ ID NO: 340 - | QVTLKESGPALVKPTQTLTLTCSFSGESLSTSGMGVGWIRQPP |
| BEAT | GKALEWIAHIWWDDDKYYNTALKTRLTISKDTSKNQVVLTM |
| OX40/CD3(SP34- | TNMDPVDTATYYCARIDWDGFAYWGQGTLVTVSSASTKGPS |
| Kappa2) antibody FAB | VFPLAPSSKSTSGGTAALGCLVKDYFPEPVTVSWNSGALTSG |
| heavy chain (anti-OX40 | VHTFPAVLQSSGLYSLSSVVTVPSSSLGTQTYICNVNHKPSNT |
| 1D4 FAB arm BT33 | KVDKKVEPKSCDKTHTCPPCPAPEAAGGPSVFLFPPKPKDTL |
| LALA) | MISRTPEVTCVVVDVSHEDPEVQFKWYVDGVEVHNAKTKPR |
| | EEQYNSTFRVVSVLTVLHQDWLNGKEYKCKVSNKALPAPIE |
| | KTISKTKGQPREPAVYTLPPSREEMTKNQVKLVCLVTGFYPS |
| | DIAVEWESSGQPENNYYTTPPMLDSDGSFSLVSWLNVDKSR |
| | WQQGNIFSCSVMHEALHNRFTQKSLSLSPG |
| SEQ ID NO: 341 - | QVQLQQPGAELVKPGASVKMSCKASGYTFTSYNMHWVKQT |
| BEAT | PGRGLEWIGAIYPGNGDTSYNQKFKGKATLTADKSSSTAYM |
| CD20/CD3(SP34- | QLSSLTSEDSAVYYCARSTYYGGDWYFNVWGAGTTVTVSAA |
| Kappa2) antibody FAB | STKGPSVFPLAPSSKSTSGGTAALGCLVKDYFPEPVTVSWNSG |
| heavy chain (anti-CD20 | ALTSGVHTFPAVLQSSGLYSLSSVVTVPSSSLGTQTYICNVNH |
| rituximab FAB arm | KPSNTKVDKKVEPKSCDKTHTCPPCPAPEAAGGPSVFLFPPKP |
| BT33 LALA) | KDTLMISRTPEVTCVVVDVSHEDPEVQFKWYVDGVEVHNAK |
| | TKPREEQYNSTFRVVSVLTVLHQDWLNGKEYKCKVSNKALP |
| | APIEKTISTKGQPREPAVYTLPPSREEMTKNQVKLVCLVTGF |
| | YPSDIAVEWESSGQPENNYYTTPPMLDSDGSFSLVSWLNVDK |
| | SRWQQGNIFSCSVMHEALHNRFTQKSLSLSPG |
| SEQ ID NO: 342 - | QVQLKQSGPGLVQPSQSLSITCTVSGFSLTNYGVHWVRQSPG |
| BEAT | KGLEWLGVIWSGGNTDYNTPFTSRLSINKDNSKSQVFFKMNS |
| EGFRcetux/CD3(SP34- | LQSNDTAIYYCARALTYYDYEFAYWGQGTLVTVSAASTKGP |
| Kappa2) antibody FAB | SVFPLAPSSKSTSGGTAALGCLVKDYFPEPVTVSWNSGALTSG |
| heavy chain (anti-EGFR | VHTFPAVLQSSGLYSLSSVVTVPSSSLGTQTYICNVNHKPSNT |
| cetuximab FAB arm | KVDKKVEPKSCDKTHTCPPCPAPEAAGGPSVFLFPPKPKDTL |
| BT33 LALA) | MISRTPEVTCVVVDVSHEDPEVQFKWYVDGVEVHNAKTKPR |
| | EEQYNSTFRSVVSVLTVLHQDWLNGKEYKCKVSNKALPAPIE |
| | KTISKTKGQPREPAVYTLPPSREEMTKNQVKLVCLVTGFYPS |
| | DIAVEWESSGQPENNYYTTPPMLDSDGSFSLVSWLNVDKSR |
| | WQQGNIFSCSVMHEALHNRFTQKSLSLSPG |
| SEQ ID NO: 343 - | QVQLQESGPGLVKPSETLSLTCTVSGGSVSSGDYYWTWIRQS |
| BEAT | PGKGLEWIGHIYYSGNTNYNPSLKSRLTISIDTSKTQFSLKLSS |
| EGFRpani/CD3(SP34- | VTAADTAIYYCVRDRVTGAFDIWGQGTMVTVSSASTKGPSV |
| Kappa2) antibody FAB | FPLAPSSKSTSGGTAALGCLVKDYFPEPVTVSWNSGALTSGV |
| heavy chain (anti-EGFR | HTFPAVLQSSGLYSLSSVVTVPSSSLGTQTYICNVNHKPSNTK |
| panitumumab FAB arm | VDKKVEPKSCDKTHTCPPCPAPEAAGGPSVFLFPPKPKDTLMI |
| BT33 LALA) | SRTPEVTCVVVDVSHEDPEVQFKWYVDGVEVHNAKTKPREE |
| | QYNSTFRVVSVLTVLHQDWLNGKEYKCKVSNKALPAPIEKTI |
| | SKTKGQPREPAVYTLPPSREEMTKNQVKLVCLVTGFYPSDIA |
| | VEWESSGQPENNYYTTPPMLDSDGSFSLVSWLNVDKSRWQQ |
| | GNIFSCSVMHEALHNRFTQKSLSLSPG |
| SEQ ID NO: 344 - | DIQMTQSPSSLSASVGDRVTITCQASQDISNYLNWYQQKPGK |
| BEAT | APKLLIYDASNLETGVPSRFSGSGSGTDFTFTISSLQPEDIATYF |
| EGFRpani/CD3(SP34- | CQHFDHLPLAFGGGTKVEIKRTVAAPSVFIFPPSDEQLKSGTA |
| Kappa2) antibody FAB | SVVCLLNNFYPREAKVQWKVDNALQSGNSQESVTEQDSKDS |
| light chain (anti-EGFR | TYSLSSTLTLSKADYEKHKVYACEVTHQGLSSPVTKSFNRGE |
| panitumumab FAB arm) | C |
| SEQ ID NO: 345 - | EVQLVESGGGLVQPGGSLRLSCAVSGYSITSGYSWNWIRQAP |
| BEAT | GKGLEWVASITYDGSTNYADSVKGRFTISRDDSKNTFYLQMN |
| IgEomali/CD3(SP34- | SLRAEDTAVYYCARGSHYFGHWHFAVWGQGTLVTVSSAST |
| Kappa2) antibody FAB | KGPSVFPLAPSSKSTSGGTAALGCLVKDYFPEPVTVSWNSGA |
| heavy chain (anti-IgE | LTSGVHTFPAVLQSSGLYSLSSVVTVPSSSLGTQTYICNVNHK |
| omalizumab FAB arm | PSNTKVDKKVEPKSCDKTHTCPPCPAPEAAGGPSVFLFPPKPK |
| BT33 LALA) | DTLMISRTPEVTCVVVVDVSHEDPEVQFKWYVDGVEVHNAKT |
| | KPREEQYNSTFRVVSVLTVLHQDWLNGKEYKCKVSNKALPA |
| | PIEKTISKTKGQPREPAVYTLPPSREEMTKNQVKLVCLVTGFY |
| | PSDIAVEWESSGQPENNYYTTPPMLDSDGSFSLVSWLNVDKS |
| | RWQQGNIFSCSVMHEALHNRFTQKSLSLSPG |
| SEQ ID NO: 346 - | DIQLTQSPSSLSASVGDRVTITCRASQSVDYDGDSYMNWYQQ |
| BEAT | KPGKAPKLLIYAASYLESGVPSRFSGSGSGTDFTLTISSLQPED |
| IgEomali/CD3(SP34- | FATYYCQQSHEDPYTFGQGTKVEIKRTVAAPSVFIFPPSDEQL |
| Kappa2) antibody FAB | KSGTASVVCLLNNFYPREAKVQWKVDNALQSGNSQESVTEQ |
| light chain (anti-IgE | DSKDSTYSLSSTLTLSKADYEKHKVYACEVTHQGLSSPVTKS |
| omalizumab FAB arm) | FNRGEC |
| SEQ ID NO: 347 - | EVQLLESGGGFVKPGGSLKLSCVVSGFTFSSYAMSWVRQTPE |
| BEAT | KRLEWVASISSGNIIYYPDNVKGRFTISRDNVRNILYLQMSSL |
| IgEbsw 17/CD3(SP34- | RSEDTAMYYCTRGRSTYGGFDHWGQGTTLTVSSASTKGPSV |
| Kappa2) antibody FAB | FPLAPSSKSTSGGTAALGCLVKDYFPEPVTVSWNSGALTSGV |
| heavy chain (anti-IgE | HTFPAVLQSSGLYSLSSVVTVPSSSLGTQTYICNVNHKPSNTK |
| Bsw17 FAB arm BT33 | VDKKVEPKSCDKTHTCPPCPAPEAAGGPSVFLFPPKPKDTLMI |
| LALA) | SRTPEVTCVVVDVSHEDPEVQFKWYVDGVEVHNAKTKPREE |
| | QYNSTFRVVSVLTVLHQDWLNGKEYKCKVSNKALPAPIEKTI |
| | SKTKGQPREPAVYTLPPSREEMTKNQVKLVCLVTGFYPSDIA |
| | VEWESSGQPENNYYTTPPMLDSDGSFSLVSWLNVDKSRWQQ |
| | GNIFSCSVMHEALHNRFTQKSLSLSPG |
| SEQ ID NO: 348 - | ELVMTQSPAIMSASPGEKVTMTCSASSSVTFIHWYRQKSGTSP |
| BEAT | KGWIYDTSKLASGVPARFSGSGSGTSYSLTISTMEAEDAATY |
| IgEbsw17/CD3(SP34- | YCQHWSGNPLTFGTGTKLELKRTVAAPSVFIFPPSDEQLKSGT |
| Kappa2) antibody FAB | ASVVCLLNNFYPREAKVQWKVDNALQSGNSQESVTEQDSKD |
| light chain (anti-IgE | STYSLSSTLTLSKADYEKHKVYACEVTHQGLSSPVTKSFNRG |
| Bsw17 FAB arm) | EC |
| SEQ ID NO: 349 - scFv | EVQLVESGGGLVQPGGSLRLSCAASGFTFNTYAMNWVRQAP |
| fragment humanized | GKGLEWVARIRSKYNNYATYYADSVKGRFTISRDDSKNTLY |
| SP34 VH1-VL24 - | LQMSLRAEDTAVYYCVRHGNFGNSYNTSWFAYWGQGTTVT |
| human IgG1 Fc fusion | VSSGGGGSGGGGSGGGGSEIVVTQSPATLSVSPGERATLSCRS |
| | SAAAVTTSNYANWVQEKPGQAFRGLIGGANKRAPGVPARFS |
| | GSLSGDEATLTISSLQSEDFAVYYCALWYSNLWVFGQGTKLE |
| | IKGGGGTDKTHTCPPCPAPELLGGPSVFLFPPKPKDTLMISRTP |
| | EVTCVVVDVSHEDPEVKFNWYVDGVEVHNAKTKPREEQYN |
| | STYRVVSVLTVLHQDWLNGKEYKCKVSNKALPAPIEKTISKA |
| | KGQPREPQVYTLPPSRDELTKNQVSLTCLVKGFYPSDIAVEW |
| | ESNGQPENNYKTTPPVLDSDGSFFLYSKLTVDKSRWQQGNVF |
| | SCSVMHEALHNHYTQKSLSLSPGK |
| SEQ ID NO: 350 - scFv | EVQLVESGGGLVQPGGSLRLSCAASGFTFNTYAMNWVRQAP |
| fragment humanized | GKGLEWVARIRSKYNNYATYYADSVKGRFTISRDDSKNTLY |
| SP34 VH1-VL25 - | LQMNSLRAEDTAVYYCVRHGNFGNSYVSWFAYWGQGTTVT |
| human IgG1 Fc fusion | VSSGGGGSGGGGSGGGGSEIVVTQSPATILSVSPGERATLSCRS |
| | STGAAATSNYANWVQEKPGQAFRGLIGGANKRAPGVPARFS |
| | GSLSGDEATLTISSLQSEDFAVYYCALWYSNLWVFGQGTKLE |
| | IKGGGGTDKTHTCPPCPAPELLGGPSVFLFPPKPKDTLMISRTP |
| | EVTCVVVDVSHEDPEVKFNWYVDGVEVHNAKTKPREEQYN |
| | STYRVVSVLTVLHQDWLNGKEYKCKVSNKALPAPIEKTISKA |
| | KGQPREPQVYTLPPSRDELTKNQVSLTCLVKGFYPSDIAVEW |
| | ESNGQPENNYKTTPPVLDSDGSFFLYSKLTVDKSRWQQGNVF |
| | SCSVMHEALHNHYTQKSLSLSPGK |
| SEQ ID NO: 351 - scFv | EVQLVESGGGLVQPGGSLRLSCAASGFTFNTYAMNWVRQAP |
| fragment humanized | GKGLEWVARIRSKYNNYATYYADSVKGRFTISRDDSKNTLY |
| SP34 VH1-VL26 - | LQMNSLRAEDTAVYYCVRHGNFGNSYVSWFAYWGQGTTVT |
| human IgG1 Fc fusion | VSSGGGGSGGGGSGGGGSEIVVTQSPATLSVSPGERATLSCRS |
| | STGAVTAANYANWVQEKPGQAFRGLIGGANKRAPGVPARFS |
| | GSLSGDEATLTISSLQSEDFAVYYCALWYSNLWVFGQGTKLE |
| | IKGGGGTDKTHTCPPCPAPELLGGPSVFLFRPKPKDTLMISRTP |
| | EVTCVVVDVSHEDPEVKFNWYVDGVEVHNAKTKPREEQYN |
| | STYRVVSVLTVLHQDWLNGKEYKCKVSNKALPAPIEKTISKA |
| | KGQPREPQVYTLPPSRDELTKNQVSLTCLVKGFYPSDIAVEW |
| | ESNGQPENNYKTTPPVLDSDGSFFLYSKLTVDKSRWQQGNVF |
| | SCSVMHEALHNHYTQKSLSLSPGK |
| SEQ ID NO: 352 - | GFTFNTYA |
| Humanized anti- human | |
| CD3 epsilon SP34 VH5 | |
| CDR H1 | |
| SEQ ID NO: 353 - | IRSKYNNYAT |
| Humanized anti- human | |
| CD3 epsilon SP34 VH5 | |
| CDR H2 | |
| SEQ ID NO: 354 - | VRHGNFGNSYVSYFAY |
| Humanized anti- human | |
| CD3 epsilon SP34 VH5 | |
| CDR H3 | |
| SEQ ID NO: 355 - | TGAVTAANY |
| Humanized anti- human | |
| CD3 epsilon SP34 VL32 | |
| CDR L1 | |
| SEQ ID NO: 356 - | GAN |
| Humanized anti- human | |
| CD3 epsilon SP34 VL32 | |
| CDR L2 | |
| SEQ ID NO: 357 - | ALFYSNLWV |
| Humanized anti- human | |
| CD3 epsilon SP34 VL32 | |
| CDR L3 | |
| SEQ ID NO: 358 - | EVQLVESGGGLVQPGGSLRLSCAASGYTFTRYTMHWVRQAP |
| OKT3 humanized VH9 | GKGLEWIGYINPSRGYTYYADSVKSRFTLSTDKSKNTAYLQM |
| domain | NSLRAEDTAVYYCARYYDDHYCLDYWGQGTLVTVSS |
| SEQ ID NO: 359 - | EVQLVESGGGLVQPGGSLRLSCAASGFTFNTYAMNWVRQAP |
| SP34 humanized IgG1 | GKGLEWVARIRSKYNNYATYYADSVKGRFTISRDDSKNTLY |
| heavy chain with VH5 | LQMNSLRAEDTAVYYCVRHGNFGNSYVSYFAYWGQGTTVT |
| | VSSASTKGPSVFPLAPSSKSTSGGTAALGCLVKDYFPEPVTVS |
| | WNSGALTSGVHTFPAVLQSSGLYSLSSVVTVPSSSLGTQTYIC |
| | NVNHKPSNTKVDKKVEPKSCDKTHTCPPCPAPELLGGPSVFL |
| | FPPKPKDTLMISRTPEVTCVVVDVSHEDPEVKFNWYVDGVEV |
| | HNAKTKPREEQYNSTYRVVSVLTVLHQDWLNGKEYKCKVS |
| | NKALPAPIEKTISKAKGQPREPQVYTLPPSREEMTKNQVSLTC |
| | LVKGFYPSDIAVEWESNGQPENNYKTTPPVLDSDGSFFLYSKL |
| | TVDKSRWQQGNVFSCSVMHEALHNHYTQKSLSLSPGK |
| SEQ ID NO: 360 - | EIVVTQSPATLSVSPGERATLSCRSSTGAVTAANYANWVQEK |
| SP34 humanized Light | PGQAFRGLIGGANKRAPGVPARFSGSLSGDEATLTISSLQSED |
| chain with VL32 | FAVYYCALFYSNLWVFGQGTKLEIKKRTVAAPSVFIFPPSDEQ |
| | LKSGTASVVCLLNNFYPREAKVQWKVDNALQSGNSQESVTE |
| | QDSKDSTYSLSSTLTLSKADYEKHKVYACEVTHQGLSSPVTK |
| | SFNRGEC |

The application's sequence listing, which the Patent Office published only in electronic form, follows.

SEQUENCE LISTING (360 sequences)

SEQ ID NO: 1 - protein, 227 aa, Artificial Sequence
  SEQ ID NO: 1 - Fc 133
DKTHTCPPCPAPELLGGPSVFLFPPKPKDTLMISRTPEVTCVVVDVSHEDPEVQFKWYVDGVEVHNAKTKPREEQYNSTFRVVSVLTVLHQDWLNGKEYKCKVSNKALPAPIEKTISKTKGQPREPQVYTLPPSREEMTKNQVSLTCLVKGFYPSDIAVEWESSGQPENNYNTTPPMLDSDGSFFLYSKLTVDKSRWQQGNIFSCSVMHEALHNRFTQKSLSLSPGK

SEQ ID NO: 2 - protein, 450 aa, Artificial Sequence
  SEQ ID NO: 2 - anti-HER2 FAB-Fc 133 heavy chain
EVQLVESGGGLVQPGGSLRLSCAASGFNIKDTYIHWVRQAPGKGLEWVARIYPTNGYTRYADSVKGRFTISADTSKNTAYLQMNSLRAEDTAVYYCSRWGGDGFYAMDYWGQGTLVTVSSASTKGPSVFPLAPSSKSTSGGTAALGCLVKDYFPEPVTVSWNSGALTSGVHTFPAVLQSSGLYSLSSVVTVPSSSLGTQTYICNVNHKPSNTKVDKKVEPKSCDKTHTCPPCPAPELLGGPSVFLFPPKPKDTLMISRTPEVTCVVVDVSHEDPEVQFKWYVDGVEVHNAKTKPREEQYNSTFRVVSVLTVLHQDWLNGKEYKCKVSNKALPAPIEKTISKTKGQPREPQVYTLPPSREEMTKNQVSLTCLVKGFYPSDIAVEWESSGQPENNYNTTPPMLDSDGSFFLYSKLTVDKSRWQQGNIFSCSVMHEALHNRFTQKSLSLSPGK

SEQ ID NO: 3 - protein, 214 aa, Artificial Sequence
  SEQ ID NO: 3 - anti-HER2 light chain
DIQMTQSPSSLSASVGDRVTITCRASQDVNTAVAWYQQKPGKAPKLLIYSASFLYSGVPSRFSGSRSGTDFTLTISSLQPEDFATYYCQQHYTTPPTFGQGTKVEIKRTVAAPSVFIFPPSDEQLKSGTASVVCLLNNFYPREAKVQWKVDNALQSGNSQESVTEQDSKDSTYSLSSTLTLSKADYEKHKVYACEVTHQGLSSPVTKSFNRGEC

SEQ ID NO: 4 - protein, 475 aa, Artificial Sequence
  SEQ ID NO: 4 - anti-HER2 scFv-Fc 133
EVQLVESGGGLVQPGGSLRLSCAASGFNIKDTYIHWVRQAPGKGLEWVARIYPTNGYTRYADSVKGRFTISADTSKNTAYLQMNSLRAEDTAVYYCSRWGGDGFYAMDYWGQGTLVTVSSGGGGSGGGGSGGGGSDIQMTQSPSSLSASVGDRVTITCRASQDVNTAVAWYQQKPGKAPKLLIYSASFLYSTVPSRFSGSRSGTDFTLTISSLQPEDFATYYCQQHYTTPPTFGQGTKVEIKRGGGGTDKTHTCPPCPAPELLGGPSVFLFPPKPKDTLMISRTPEVTCVVVDVSHEDPEVQFKWYVDGVEVHNAKTKPREEQYNSTFRVVSVLTVLHQDWLNGKEYKCKVSNKALPAPIEKTISKTKGQPREPQVYTLPPSREEMTKNQVSLTCLVKGFYPSDIAVEWESSGQPENNYNTTPPMLDSDGSFFLYSKLTVDKSRWQQGNIFSCSVMHEALHNRFTQKSLSLSPGK

SEQ ID NO: 5 - protein, 223 aa, Artificial Sequence
  SEQ ID NO: 5 - anti-HER2 FAB heavy chain
EVQLVESGGGLVQPGGSLRLSCAASGFNIKDTYIHWVRQAPGKGLEWVARIYPTNGYTRYADSVKGRFTISADTSKNTAYLQMNSLRAEDTAVYYCSRWGGDGFYAMDYWGQGTLVTVSSASTKGPSVFPLAPSSKSTSGGTAALGCLVKDYFPEPVTVSWNSGALTSGVHTFPAVLQSSGLYSLSSVVTVPSSSLGTQTYICNVNHKPSNTKVDKKVEPKSC

SEQ ID NO: 6 - protein, 223 aa, Artificial Sequence
  SEQ ID NO: 6 - anti-HER2 FAB G65S heavy chain
EVQLVESGGGLVQPGGSLRLSCAASGFNIKDTYIHWVRQAPGKGLEWVARIYPTNGYTRYADSVKSRFTISADTSKNTAYLQMNSLRAEDTAVYYCSRWGGDGFYAMDYWGQGTLVTVSSASTKGPSVFPLAPSSKSTSGGTAALGCLVKDYFPEPVTVSWNSGALTSGVHTFPAVLQSSGLYSLSSVVTVPSSSLGTQTYICNVNHKPSNTKVDKKVEPKSC

SEQ ID NO: 7 - protein, 223 aa, Artificial Sequence
  SEQ ID NO: 7 - anti-HER2 FAB R66Q heavy chain
EVQLVESGGGLVQPGGSLRLSCAASGFNIKDTYIHWVRQAPGKGLEWVARIYPTNGYTRYADSVKGQFTISADTSKNTAYLQMNSLRAEDTAVYYCSRWGGDGFYAMDYWGQGTLVTVSSASTKGPSVFPLAPSSKSTSGGTAALGCLVKDYFPEPVTVSWNSGALTSGVHTFPAVLQSSGLYSLSSVVTVPSSSLGTQTYICNVNHKPSNTKVDKKVEPKSC

SEQ ID NO: 8 - protein, 223 aa, Artificial Sequence
  SEQ ID NO: 8 - anti-HER2 FAB T68V heavy chain
EVQLVESGGGLVQPGGSLRLSCAASGFNIKDTYIHWVRQAPGKGLEWVARIYPTNGYTRYADSVKGRFVISADTSKNTAYLQMNSLRAEDTAVYYCSRWGGDGFYAMDYWGQGTLVTVSSASTKGPSVFPLAPSSKSTSGGTAALGCLVKDYFPEPVTVSWNSGALTSGVHTFPAVLQSSGLYSLSSVVTVPSSSLGTQTYICNVNHKPSNTKVDKKVEPKSC

SEQ ID NO: 9 - protein, 223 aa, Artificial Sequence
  SEQ ID NO: 9 - anti-HER2 FAB Q81E heavy chain
EVQLVESGGGLVQPGGSLRLSCAASGFNIKDTYIHWVRQAPGKGLEWVARIYPTNGYTRYADSVKGRFTISADTSKNTAYLEMNSLRAEDTAVYYCSRWGGDGFYAMDYWGQGTLVTVSSASTKGPSVFPLAPSSKSTSGGTAALGCLVKDYFPEPVTVSWNSGALTSGVHTFPAVLQSSGLYSLSSVVTVPSSSLGTQTYICNVNHKPSNTKVDKKVEPKSC

SEQ ID NO: 10 - protein, 223 aa, Artificial Sequence
  SEQ ID NO: 10 - anti-HER2 FAB N82aS heavy chain
EVQLVESGGGLVQPGGSLRLSCAASGFNIKDTYIHWVRQAPGKGLEWVARIYPTNGYTRYADSVKGRFTISADTSKNTAYLQMSSLRAEDTAVYYCSRWGGDGFYAMDYWGQGTLVTVSSASTKGPSVFPLAPSSKSTSGGTAALGCLVKDYFPEPVTVSWNSGALTSGVHTFPAVLQSSGLYSLSSVVTVPSSSLGTQTYICNVNHKPSNTKVDKKVEPKSC

SEQ ID NO: 11 - protein, 223 aa, Artificial Sequence
  SEQ ID NO: 11 - anti-HER2 FAB R19G/T57A/Y59A heavy chain
EVQLVESGGGLVQPGGSLGLSCAASGFNIKDTYIHWVRQAPGKGLEWVARIYPTNGYARAADSVKGRFTISADTSKNTAYLQMNSLRAEDTAVYYCSRWGGDGFYAMDYWGQGTLVTVSSASTKGPSVFPLAPSSKSTSGGTAALGCLVKDYFPEPVTVSWNSGALTSGVHTFPAVLQSSGLYSLSSVVTVPSSSLGTQTYICNVNHKPSNTKVDKKVEPKSC

SEQ ID NO: 12 - protein, 223 aa, Artificial Sequence
  SEQ ID NO: 12 - anti-HER2 FAB T57A heavy chain
EVQLVESGGGLVQPGGSLRLSCAASGFNIKDTYIHWVRQAPGKGLEWVARIYPTNGYARYADSVKGRFTISADTSKNTAYLQMNSLRAEDTAVYYCSRWGGDGFYAMDYWGQGTLVTVSSASTKGPSVFPLAPSSKSTSGGTAALGCLVKDYFPEPVTVSWNSGALTSGVHTFPAVLQSSGLYSLSSVVTVPSSSLGTQTYICNVNHKPSNTKVDKKVEPKSC

SEQ ID NO: 13 - protein, 223 aa, Artificial Sequence
  SEQ ID NO: 13 - anti-HER2 FAB T57E heavy chain
EVQLVESGGGLVQPGGSLRLSCAASGFNIKDTYIHWVRQAPGKGLEWVARIYPTNGYERYADSVKGRFTISADTSKNTAYLQMNSLRAEDTAVYYCSRWGGDGFYAMDYWGQGTLVTVSSASTKGPSVFPLAPSSKSTSGGTAALGCLVKDYFPEPVTVSWNSGALTSGVHTFPAVLQSSGLYSLSSVVTVPSSSLGTQTYICNVNHKPSNTKVDKKVEPKSC

SEQ ID NO: 14 - protein, 475 aa, Artificial Sequence
  SEQ ID NO: 14 - anti-HER2 scFv(G65S)-Fc 133 heavy chain
EVQLVESGGGLVQPGGSLRLSCAASGFNIKDTYIHWVRQAPGKGLEWVARIYPTNGYTRYADSVKSRFTISADTSKNTAYLQMNSLRAEDTAVYYCSRWGGDGFYAMDYWGQGTLVTVSSGGGGSGGGGSGGGGSDIQMTQSPSSLSASVGDRVTITCRASQDVNTAVAWYQQKPGKAPKLLIYSASFLYSTVPSRFSGSRSGTDFTLTISSLQPEDFATYYCQQHYTTPPTFGQGTKVEIKRGGGGTDKTHTCPPCPAPELLGGPSVFLFPPKPKDTLMISRTPEVTCVVVDVSHEDPEVQFKWYVDGVEVHNAKTKPREEQYNSTFRVVSVLTVLHQDWLNGKEYKCKVSNKALPAPIEKTISKTKGQPREPQVYTLPPSREEMTKNQVSLTCLVKGFYPSDIAVEWESSGQPENNYNTTPPMLDSDGSFFLYSKLTVDKSRWQQGNIFSCSVMHEALHNRFTQKSLSLSPGK

SEQ ID NO: 15 - protein, 475 aa, Artificial Sequence
  SEQ ID NO: 15 - anti-HER2 scFv(N82aS)-Fc 133 heavy chain
EVQLVESGGGLVQPGGSLRLSCAASGFNIKDTYIHWVRQAPGKGLEWVARIYPTNGYTRYADSVKGRFTISADTSKNTAYLQMSSLRAEDTAVYYCSRWGGDGFYAMDYWGQGTLVTVSSGGGGSGGGGSGGGGSDIQMTQSPSSLSASVGDRVTITCRASQDVNTAVAWYQQKPGKAPKLLIYSASFLYSTVPSRFSGSRSGTDFTLTISSLQPEDFATYYCQQHYTTPPTFGQGTKVEIKRGGGGTDKTHTCPPCPAPELLGGPSVFLFPPKPKDTLMISRTPEVTCVVVDVSHEDPEVQFKWYVDGVEVHNAKTKPREEQYNSTFRVVSVLTVLHQDWLNGKEYKCKVSNKALPAPIEKTISKTKGQPREPQVYTLPPSREEMTKNQVSLTCLVKGFYPSDIAVEWESSGQPENNYNTTPPMLDSDGSFFLYSKLTVDKSRWQQGNIFSCSVMHEALHNRFTQKSLSLSPGK

SEQ ID NO: 16 - protein, 450 aa, Artificial Sequence
  SEQ ID NO: 16 - anti-HER2 FAB(G65S)-Fc 133 heavy chain
EVQLVESGGGLVQPGGSLRLSCAASGFNIKDTYIHWVRQAPGKGLEWVARIYPTNGYTRYADSVKSRFTISADTSKNTAYLQMNSLRAEDTAVYYCSRWGGDGFYAMDYWGQGTLVTVSSASTKGPSVFPLAPSSKSTSGGTAALGCLVKDYFPEPVTVSWNSGALTSGVHTFPAVLQSSGLYSLSSVVTVPSSSLGTQTYICNVNHKPSNTKVDKKVEPKSCDKTHTCPPCPAPELLGGPSVFLFPPKPKDTLMISRTPEVTCVVVDVSHEDPEVQFKWYVDGVEVHNAKTKPREEQYNSTFRVVSVLTVLHQDWLNGKEYKCKVSNKALPAPIEKTISKTKGQPREPQVYTLPPSREEMTKNQVSLTCLVKGFYPSDIAVEWESSGQPENNYNTTPPMLDSDGSFFLYSKLTVDKSRWQQGNIFSCSVMHEALHNRFTQKSLSLSPGK

SEQ ID NO: 17 - protein, 450 aa, Artificial Sequence
  SEQ ID NO: 17 - anti-HER2 FAB(N82aS)-Fc 133 heavy chain
EVQLVESGGGLVQPGGSLRLSCAASGFNIKDTYIHWVRQAPGKGLEWVARIYPTNGYTRYADSVKGRFTISADTSKNTAYLQMSSLRAEDTAVYYCSRWGGDGFYAMDYWGQGTLVTVSSASTKGPSVFPLAPSSKSTSGGTAALGCLVKDYFPEPVTVSWNSGALTSGVHTFPAVLQSSGLYSLSSVVTVPSSSLGTQTYICNVNHKPSNTKVDKKVEPKSCDKTHTCPPCPAPELLGGPSVFLFPPKPKDTLMISRTPEVTCVVVDVSHEDPEVQFKWYVDGVEVHNAKTKPREEQYNSTFRVVSVLTVLHQDWLNGKEYKCKVSNKALPAPIEKTISKTKGQPREPQVYTLPPSREEMTKNQVSLTCLVKGFYPSDIAVEWESSGQPENNYNTTPPMLDSDGSFFLYSKLTVDKSRWQQGNIFSCSVMHEALHNRFTQKSLSLSPGK

SEQ ID NO: 18 - protein, 119 aa, Artificial Sequence [sequence omitted]

SEQ ID NO: 19 - protein, 106 aa, Artificial Sequence [sequence omitted]

SEQ ID NO: 20 - protein, 120 aa, Artificial Sequence [sequence omitted]

SEQ ID NO: 21 - protein, 107 aa, Artificial Sequence [sequence omitted]

SEQ ID NO: 22 - protein, 98 aa, Homo sapiens
EVQLVESGGGLVQPGGSLRLSCAASGFTFSSYAMSWVRQAPGKGLEWVSAISGSGGSTYYADSVKGRFTISRDNSKNTLYLQMNSLRAEDTAVYYCAK

SEQ ID NO: 23 - protein, 95 aa, Homo sapiens
DIQMTQSPSSLSASVGDRVTITCRASQSISSYLNWYQQKPGKAPKLLIYAASSLQSGVPSRFSGSGSGTDFTLTISSLQPEDFATYYCQQSYSTP

SEQ ID NO: 24 - protein, 96 aa, Homo sapiens
EIVLTQSPGTLSLSPGERATLSCRASQSVSSSYLAWYQQKPGQAPRLLIYGASSRATGIPDRFSGSGSGTDFTLTISRLEPEDFAVYYCQQYGSSP

SEQ ID NO: 25 - protein, 449 aa, Artificial Sequence
  SEQ ID NO: 25 - Chimeric OKT3 heavy chain IgG1
QVQLQQSGAELARPGASVKMSCKASGYTFTRYTMHWVKQRPGQGLEWIGYINPSRGYTNYNQKFKDKATLTTDKSSSTAYMQLSSLTSEDSAVYYCARYYDDHYCLDYWGQGTTLTVSSASTKGPSVFPLAPSSKSTSGGTAALGCLVKDYFPEPVTVSWNSGALTSGVHTFPAVLQSSGLYSLSSVVTVPSSSLGTQTYICNVNHKPSNTKVDKKVEPKSCDKTHTCPPCPAPELLGGPSVFLFPPKPKDTLMISRTPEVTCVVVDVSHEDPEVKFNWYVDGVEVHNAKTKPREEQYNSTYRVVSVLTVLHQDWLNGKEYKCKVSNKALPAPIEKTISKAKGQPREPQVYTLPPSRDELTKNQVSLTCLVKGFYPSDIAVEWESNGQPENNYKTTPPVLDSDGSFFLYSKLTVDKSRWQQGNVFSCSVMHEALHNHYTQKSLSLSPGK

SEQ ID NO: 26 - protein, 213 aa, Artificial Sequence
  SEQ ID NO: 26 - Chimeric OKT3 human kappa light chain
QIVLTQSPAIMSASPGEKVTMTCSASSSVSYMNWYQQKSGTSPKRWIYDTSKLASGVPAHFRGSGSGTSYSLTISGMEAEDAATYYCQQWSSNPFTFGSGTKLEINRTVAAPSVFIFPPSDEQLKSGTASVVCLLNNFYPREAKVQWKVDNALQSGNSQESVTEQDSKDSTYSLSSTLTLSKADYEKHKVYACEVTHQGLSSPVTKSFNRGEC

SEQ ID NO: 27 - protein, 449 aa, Artificial Sequence
  SEQ ID NO: 27 - OKT3 humanized heavy chain with VH domain
EVQLVESGGGLVQPGGSLRLSCAASGYTFTRYTIHWVRQAPGKGLEWVAYINPSRGYTRYADSVKGRFTISADTSKNTAYLQMNSLRAEDTAVYYCARYYDDHYCLDYWGQGTLVTVSSASTKGPSVFPLAPSSKSTSGGTAALGCLVKDYFPEPVTVSWNSGALTSGVHTFPAVLQSSGLYSLSSVVTVPSSSLGTQTYICNVNHKPSNTKVDKKVEPKSCDKTHTCPPCPAPELLGGPSVFLFPPKPKDTLMISRTPEVTCVVVDVSHEDPEVKFNWYVDGVEVHNAKTKPREEQYNSTYRVVSVLTVLHQDWLNGKEYKCKVSNKALPAPIEKTISKAKGQPREPQVYTLPPSRDELTKNQVSLTCLVKGFYPSDIAVEWESNGQPENNYKTTPPVLDSDGSFFLYSKLTVDKSRWQQGNVFSCSVMHEALHNHYTQKSLSLSPGK

SEQ ID NO: 28 - protein, 449 aa, Artificial Sequence
  SEQ ID NO: 28 - OKT3 humanized heavy chain with VH1 domain
EVQLVESGGGLVQPGGSLRLSCAASGYTFTRYTIHWVRQAPGKGLEWVGYINPSRGYTRYADSVKGRFTISADTSKNTAYLQMNSLRAEDTAVYYCARYYDDHYCLDYWGQGTLVTVSSASTKGPSVFPLAPSSKSTSGGTAALGCLVKDYFPEPVTVSWNSGALTSGVHTFPAVLQSSGLYSLSSVVTVPSSSLGTQTYICNVNHKPSNTKVDKKVEPKSCDKTHTCPPCPAPELLGGPSVFLFPPKPKDTLMISRTPEVTCVVVDVSHEDPEVKFNWYVDGVEVHNAKTKPREEQYNSTYRVVSVLTVLHQDWLNGKEYKCKVSNKALPAPIEKTISKAKGQPREPQVYTLPPSRDELTKNQVSLTCLVKGFYPSDIAVEWESNGQPENNYKTTPPVLDSDGSFFLYSKLTVDKSRWQQGNVFSCSVMHEALHNHYTQKSLSLSPGK

SEQ ID NO: 29 - protein, 449 aa, Artificial Sequence
  SEQ ID NO: 29 - OKT3 humanized heavy chain with VH2 domain
EVQLVESGGGLVQPGGSLRLSCAASGYTFTRYTMHWVRQAPGKGLEWVGYINPSRGYTRYADSVKGRFTISADTSKNTAYLQMNSLRAEDTAVYYCARYYDDHYCLDYWGQGTLVTVSSASTKGPSVFPLAPSSKSTSGGTAALGCLVKDYFPEPVTVSWNSGALTSGVHTFPAVLQSSGLYSLSSVVTVPSSSLGTQTYICNVNHKPSNTKVDKKVEPKSCDKTHTCPPCPAPELLGGPSVFLFPPKPKDTLMISRTPEVTCVVVDVSHEDPEVKFNWYVDGVEVHNAKTKPREEQYNSTYRVVSVLTVLHQDWLNGKEYKCKVSNKALPAPIEKTISKAKGQPREPQVYTLPPSRDELTKNQVSLTCLVKGFYPSDIAVEWESNGQPENNYKTTPPVLDSDGSFFLYSKLTVDKSRWQQGNVFSCSVMHEALHNHYTQKSLSLSPGK

SEQ ID NO: 30 - protein, 449 aa, Artificial Sequence
  SEQ ID NO: 30 - OKT3 humanized heavy chain with VH3 domain
EVQLVESGGGLVQPGGSLRLSCAASGYTFTRYTIHWVRQAPGKGLEWVGYINPSRGYTRYADSVKGRFTISTDTSKNTAYLQMNSLRAEDTAVYYCARYYDDHYCLDYWGQGTLVTVSSASTKGPSVFPLAPSSKSTSGGTAALGCLVKDYFPEPVTVSWNSGALTSGVHTFPAVLQSSGLYSLSSVVTVPSSSLGTQTYICNVNHKPSNTKVDKKVEPKSCDKTHTCPPCPAPELLGGPSVFLFPPKPKDTLMISRTPEVTCVVVDVSHEDPEVKFNWYVDGVEVHNAKTKPREEQYNSTYRVVSVLTVLHQDWLNGKEYKCKVSNKALPAPIEKTISKAKGQPREPQVYTLPPSRDELTKNQVSLTCLVKGFYPSDIAVEWESNGQPENNYKTTPPVLDSDGSFFLYSKLTVDKSRWQQGNVFSCSVMHEALHNHYTQKSLSLSPGK

SEQ ID NO: 31 - protein, 449 aa, Artificial Sequence
  SEQ ID NO: 31 - OKT3 humanized heavy chain with VH4 domain
EVQLVESGGGLVQPGGSLRLSCAASGYTFTRYTMHWVRQAPGKGLEWVGYINPSRGYTRYADSVKGRFTISTDTSKNTAYLQMNSLRAEDTAVYYCARYYDDHYCLDYWGQGTLVTVSSASTKGPSVFPLAPSSKSTSGGTAALGCLVKDYFPEPVTVSWNSGALTSGVHTFPAVLQSSGLYSLSSVVTVPSSSLGTQTYICNVNHKPSNTKVDKKVEPKSCDKTHTCPPCPAPELLGGPSVFLFPPKPKDTLMISRTPEVTCVVVDVSHEDPEVKFNWYVDGVEVHNAKTKPREEQYNSTYRVVSVLTVLHQDWLNGKEYKCKVSNKALPAPIEKTISKAKGQPREPQVYTLPPSRDELTKNQVSLTCLVKGFYPSDIAVEWESNGQPENNYKTTPPVLDSDGSFFLYSKLTVDKSRWQQGNVFSCSVMHEALHNHYTQKSLSLSPGK

SEQ ID NO: 32 - protein, 449 aa, Artificial Sequence
  SEQ ID NO: 32 - OKT3 humanized heavy chain with VH5 domain
EVQLVESGGGLVQPGGSLRLSCAASGYTFTRYTMHWVRQAPGKGLEWVGYINPSRGYTRYADSVKGRFTLSTDKSKNTAYLQMNSLRAEDTAVYYCARYYDDHYCLDYWGQGTLVTVSSASTKGPSVFPLAPSSKSTSGGTAALGCLVKDYFPEPVTVSWNSGALTSGVHTFPAVLQSSGLYSLSSVVTVPSSSLGTQTYICNVNHKPSNTKVDKKVEPKSCDKTHTCPPCPAPELLGGPSVFLFPPKPKDTLMISRTPEVTCVVVDVSHEDPEVKFNWYVDGVEVHNAKTKPREEQYNSTYRVVSVLTVLHQDWLNGKEYKCKVSNKALPAPIEKTISKAKGQPREPQVYTLPPSRDELTKNQVSLTCLVKGFYPSDIAVEWESNGQPENNYKTTPPVLDSDGSFFLYSKLTVDKSRWQQGNVFSCSVMHEALHNHYTQKSLSLSPGK

SEQ ID NO: 33 - protein, 449 aa, Artificial Sequence
  SEQ ID NO: 33 - OKT3 humanized heavy chain with VH6 domain
EVQLVESGGGLVQPGGSLRLSCAASGYTFTRYTMHWVRQAPGKGLEWIGYINPSRGYTRYADSVKGRFTLSTDKSKNTAYLQMNSLRAEDTAVYYCARYYDDHYCLDYWGQGTLVTVSSASTKGPSVFPLAPSSKSTSGGTAALGCLVKDYFPEPVTVSWNSGALTSGVHTFPAVLQSSGLYSLSSVVTVPSSSLGTQTYICNVNHKPSNTKVDKKVEPKSCDKTHTCPPCPAPELLGGPSVFLFPPKPKDTLMISRTPEVTCVVVDVSHEDPEVKFNWYVDGVEVHNAKTKPREEQYNSTYRVVSVLTVLHQDWLNGKEYKCKVSNKALPAPIEKTISKAKGQPREPQVYTLPPSRDELTKNQVSLTCLVKGFYPSDIAVEWESNGQPENNYKTTPPVLDSDGSFFLYSKLTVDKSRWQQGNVFSCSVMHEALHNHYTQKSLSLSPGK

SEQ ID NO: 34 - protein, 449 aa, Artificial Sequence
  SEQ ID NO: 34 - OKT3 humanized heavy chain with VH7 domain
EVQLVESGGGLVQPGGSLRLSCAASGYTFTRYTMHWVRQAPGKGLEWVGYINPSRGYTNYADSVKGRFTLSTDKSKNTAYLQMNSLRAEDTAVYYCARYYDDHYCLDYWGQGTLVTVSSASTKGPSVFPLAPSSKSTSGGTAALGCLVKDYFPEPVTVSWNSGALTSGVHTFPAVLQSSGLYSLSSVVTVPSSSLGTQTYICNVNHKPSNTKVDKKVEPKSCDKTHTCPPCPAPELLGGPSVFLFPPKPKDTLMISRTPEVTCVVVDVSHEDPEVKFNWYVDGVEVHNAKTKPREEQYNSTYRVVSVLTVLHQDWLNGKEYKCKVSNKALPAPIEKTISKAKGQPREPQVYTLPPSRDELTKNQVSLTCLVKGFYPSDIAVEWESNGQPENNYKTTPPVLDSDGSFFLYSKLTVDKSRWQQGNVFSCSVMHEALHNHYTQKSLSLSPGK

SEQ ID NO: 35 - protein, 449 aa, Artificial Sequence
  SEQ ID NO: 35 - OKT3 humanized heavy chain with VH8 domain
EVQLVESGGGLVQPGGSLRLSCAASGYTFTRYTMHWVRQAPGKGLEWIGYINPSRGYTYYADSVKGRFTLSTDKSKNTAYLQMNSLRAEDTAVYYCARYYDDHYCLDYWGQGTLVTVSSASTKGPSVFPLAPSSKSTSGGTAALGCLVKDYFPEPVTVSWNSGALTSGVHTFPAVLQSSGLYSLSSVVTVPSSSLGTQTYICNVNHKPSNTKVDKKVEPKSCDKTHTCPPCPAPELLGGPSVFLFPPKPKDTLMISRTPEVTCVVVDVSHEDPEVKFNWYVDGVEVHNAKTKPREEQYNSTYRVVSVLTVLHQDWLNGKEYKCKVSNKALPAPIEKTISKAKGQPREPQVYTLPPSRDELTKNQVSLTCLVKGFYPSDIAVEWESNGQPENNYKTTPPVLDSDGSFFLYSKLTVDKSRWQQGNVFSCSVMHEALHNHYTQKSLSLSPGK

SEQ ID NO: 36 - protein, 449 aa, Artificial Sequence
  SEQ ID NO: 36 - OKT3 humanized heavy chain with VH9 domain
EVQLVESGGGLVQPGGSLRLSCAASGYTFTRYTMHWVRQAPGKGLEWIGYINPSRGYTYYADSVKSRFTLSTDKSKNTAYLQMNSLRAEDTAVYYCARYYDDHYCLDYWGQGTLVTVSSASTKGPSVFPLAPSSKSTSGGTAALGCLVKDYFPEPVTVSWNSGALTSGVHTFPAVLQSSGLYSLSSVVTVPSSSLGTQTYICNVNHKPSNTKVDKKVEPKSCDKTHTCPPCPAPELLGGPSVFLFPPKPKDTLMISRTPEVTCVVVDVSHEDPEVKFNWYVDGVEVHNAKTKPREEQYNSTYRVVSVLTVLHQDWLNGKEYKCKVSNKALPAPIEKTISKAKGQPREPQVYTLPPSRDELTKNQVSLTCLVKGFYPSDIAVEWESNGQPENNYKTTPPVLDSDGSFFLYSKLTVDKSRWQQGNVFSCSVMHEALHNHYTQKSLSLSPGK

SEQ ID NO: 37 - protein, 449 aa, Artificial Sequence
  SEQ ID NO: 37 - OKT3 humanized heavy chain with VH10 domain
EVQLVESGGGLVQPGGSLRLSCAASGYTFTRYTMHWVRQAPGKGLEWIGYINPSRGYTYYADSVKSRATLSTDKSKNTAYLQMNSLRAEDTAVYYCARYYDDHYCLDYWGQGTLVTVSSASTKGPSVFPLAPSSKSTSGGTAALGCLVKDYFPEPVTVSWNSGALTSGVHTFPAVLQSSGLYSLSSVVTVPSSSLGTQTYICNVNHKPSNTKVDKKVEPKSCDKTHTCPPCPAPELLGGPSVFLFPPKPKDTLMISRTPEVTCVVVDVSHEDPEVKFNWYVDGVEVHNAKTKPREEQYNSTYRVVSVLTVLHQDWLNGKEYKCKVSNKALPAPIEKTISKAKGQPREPQVYTLPPSRDELTKNQVSLTCLVKGFYPSDIAVEWESNGQPENNYKTTPPVLDSDGSFFLYSKLTVDKSRWQQGNVFSCSVMHEALHNHYTQKSLSLSPGK

SEQ ID NO: 38 - protein, 449 aa, Artificial Sequence
  SEQ ID NO: 38 - OKT3 humanized heavy chain with VH11 domain
EVQLVESGGGLVQPGGSLRLSCAASGYTFTRYTMHWVRQAPGKGLEWIGYINPSRGYTYYADSVKGRFTLSTDKSKNTAYLQMSSLRAEDTAVYYCARYYDDHYCLDYWGQGTLVTVSSASTKGPSVFPLAPSSKSTSGGTAALGCLVKDYFPEPVTVSWNSGALTSGVHTFPAVLQSSGLYSLSSVVTVPSSSLGTQTYICNVNHKPSNTKVDKKVEPKSCDKTHTCPPCPAPELLGGPSVFLFPPKPKDTLMISRTPEVTCVVVDVSHEDPEVKFNWYVDGVEVHNAKTKPREEQYNSTYRVVSVLTVLHQDWLNGKEYKCKVSNKALPAPIEKTISKAKGQPREPQVYTLPPSRDELTKNQVSLTCLVKGFYPSDIAVEWESNGQPENNYKTTPPVLDSDGSFFLYSKLTVDKSRWQQGNVFSCSVMHEALHNHYTQKSLSLSPGK

SEQ ID NO: 39 - protein, 213 aa, Artificial Sequence
  SEQ ID NO: 39 - OKT3 humanized light chain with VL domain
DIQMTQSPSSLSASVGDRVTITCRASSSVSYVAWYQQKPGKAPKLLIYDTSKLYSGVPSRFSGSRSGTDFTLTISSLQPEDFATYYCQQWSSNPPTFGQGTKVEIKRTVAAPSVFIFPPSDEQLKSGTASVVCLLNNFYPREAKVQWKVDNALQSGNSQESVTEQDSKDSTYSLSSTLTLSKADYEKHKVYACEVTHQGLSSPVTKSFNRGEC

SEQ ID NO: 40 - protein, 213 aa, Artificial Sequence
  SEQ ID NO: 40 - OKT3 humanized light chain with VL1 domain
DIQMTQSPSSLSASVGDRVTITCRASSSVSYVAWYQQKPGKAPKLLIYDTSKLYSGVPSRFSGSRSGTDYTLTISSLQPEDFATYYCQQWSSNPPTFGQGTKVEIKRTVAAPSVFIFPPSDEQLKSGTASVVCLLNNFYPREAKVQWKVDNALQSGNSQESVTEQDSKDSTYSLSSTLTLSKADYEKHKVYACEVTHQGLSSPVTKSFNRGEC

SEQ ID NO: 41 - protein, 213 aa, Artificial Sequence
  SEQ ID NO: 41 - OKT3 humanized light chain with VL2 domain
DIQLTQSPSSLSASVGDRVTITCRASSSVSYVAWYQQKPGKAPKLLIYDTSKLYSGVPSRFSGSRSGTDFTLTISSLQPEDFATYYCQQWSSNPPTFGQGTKVEIKRTVAAPSVFIFPPSDEQLKSGTASVVCLLNNFYPREAKVQWKVDNALQSGNSQESVTEQDSKDSTYSLSSTLTLSKADYEKHKVYACEVTHQGLSSPVTKSFNRGEC

SEQ ID NO: 42 - protein, 213 aa, Artificial Sequence
  SEQ ID NO: 42 - OKT3 humanized light chain with VL3 domain
DIQLTQSPSSLSASVGDRVTITCRASSSVSYVAWYQQKPGKAPKLLIYDTSKLYSGVPSRFSGSRSGTDYTLTISSLQPEDFATYYCQQWSSNPPTFGQGTKVEIKRTVAAPSVFIFPPSDEQLKSGTASVVCLLNNFYPREAKVQWKVDNALQSGNSQESVTEQDSKDSTYSLSSTLTLSKADYEKHKVYACEVTHQGLSSPVTKSFNRGEC

SEQ ID NO: 43 - protein, 213 aa, Artificial Sequence
  SEQ ID NO: 43 - OKT3 humanized light chain with VL4 domain
DIQLTQSPSSLSASVGDRVTITCRASSSVSYVAWYQQKPGKAPKRWIYDTSKLYSGVPSRFSGSRSGTDYTLTISSLQPEDFATYYCQQWSSNPPTFGQGTKVEIKRTVAAPSVFIFPPSDEQLKSGTASVVCLLNNFYPREAKVQWKVDNALQSGNSQESVTEQDSKDSTYSLSSTLTLSKADYEKHKVYACEVTHQGLSSPVTKSFNRGEC

SEQ ID NO: 44 - protein, 213 aa, Artificial Sequence
  SEQ ID NO: 44 - OKT3 humanized light chain with VL5 domain
DIQLTQSPSSLSASVGDRVTITCRASSSVSYMNWYQQKPGKAPKLLIYDTSKLYSGVPSRFSGSRSGTDYTLTISSLQPEDFATYYCQQWSSNPPTFGQGTKVEIKRTVAAPSVFIFPPSDEQLKSGTASVVCLLNNFYPREAKVQWKVDNALQSGNSQESVTEQDSKDSTYSLSSTLTLSKADYEKHKVYACEVTHQGLSSPVTKSFNRGEC

SEQ ID NO: 45 - protein, 213 aa, Artificial Sequence
  SEQ ID NO: 45 - OKT3 humanized light chain with VL6 domain
DIQLTQSPSSLSASVGDRVTITCRASSSVSYVAWYQQKPGKAPKRWIYDTSKLYSGVPSRFSGSRSGTDYTLTISSLQPEDFATYYCQQWSSNPFTFGQGTKVEIKRTVAAPSVFIFPPSDEQLKSGTASVVCLLNNFYPREAKVQWKVDNALQSGNSQESVTEQDSKDSTYSLSSTLTLSKADYEKHKVYACEVTHQGLSSPVTKSFNRGEC

SEQ ID NO: 46 - protein, 213 aa, Artificial Sequence
  SEQ ID NO: 46 - OKT3 humanized light chain with VL7 domain
DIQLTQSPSSLSASVGDRVTITCRASSSVSYMNWYQQKPGKAPKLLIYDTSKLYSGVPSRFSGSRSGTDYTLTISSLQPEDFATYYCQQWSSNPFTFGQGTKVEIKRTVAAPSVFIFPPSDEQLKSGTASVVCLLNNFYPREAKVQWKVDNALQSGNSQESVTEQDSKDSTYSLSSTLTLSKADYEKHKVYACEVTHQGLSSPVTKSFNRGEC

SEQ ID NO: 47 - protein, 213 aa, Artificial Sequence
  SEQ ID NO: 47 - OKT3 humanized light chain with VL8 domain
DIQLTQSPSSLSASVGDRVTITCRASSSVSYVAWYQQKPGKAPKRWIYDTSKLYSGVPSRFSGSGSGTDYTLTISSLQPEDFATYYCQQWSSNPPTFGQGTKVEIKRTVAAPSVFIFPPSDEQLKSGTASVVCLLNNFYPREAKVQWKVDNALQSGNSQESVTEQDSKDSTYSLSSTLTLSKADYEKHKVYACEVTHQGLSSPVTKSFNRGEC

SEQ ID NO: 48 - protein, 119 aa, Artificial Sequence
  SEQ ID NO: 48 - OKT3 humanized VH8 domain
EVQLVESGGGLVQPGGSLRLSCAASGYTFTRYTMHWVRQAPGKGLEWIGYINPSRGYTYYADSVKGRFTLSTDKSKNTAYLQMNSLRAEDTAVYYCARYYDDHYCLDYWGQGTLVTVSS

SEQ ID NO: 49 - protein, 119 aa, Artificial Sequence
  SEQ ID NO: 49 - OKT3 humanized VH11 domain
EVQLVESGGGLVQPGGSLRLSCAASGYTFTRYTMHWVRQAPGKGLEWIGYINPSRGYTYYADSVKGRFTLSTDKSKNTAYLQMSSLRAEDTAVYYCARYYDDHYCLDYWGQGTLVTVSS

SEQ ID NO: 50 - protein, 106 aa, Artificial Sequence
  SEQ ID NO: 50 - OKT3 humanized VL4 domain
DIQLTQSPSSLSASVGDRVTITCRASSSVSYVAWYQQKPGKAPKRWIYDTSKLYSGVPSRFSGSRSGTDYTLTISSLQPEDFATYYCQQWSSNPPTFGQGTKVEIK

SEQ ID NO: 51 - protein, 106 aa, Artificial Sequence
  SEQ ID NO: 51 - OKT3 humanized VL8 domain
DIQLTQSPSSLSASVGDRVTITCRASSSVSYVAWYQQKPGKAPKRWIYDTSKLYSGVPSRFSGSGSGTDYTLTISSLQPEDFATYYCQQWSSNPPTFGQGTKVEIK

SEQ ID NO: 52 - protein, 472 aa, Artificial Sequence
  SEQ ID NO: 52 - scFv fragment  mouse OKT3 - human IgG1 Fc fusion
QVQLQQSGAELARPGASVKMSCKASGYTFTRYTMHWVKQRPGQGLEWIGYINPSRGYTNYNQKFKDKATLTTDKSSSTAYMQLSSLTSEDSAVYYCARYYDDHYCLDYWGQGTTLTVSSGGGGSGGGGSGGGGSQIVLTQSPAIMSASPGEKVTMTCSASSSVSYMNWYQQKSGTSPKRWIYDTSKLASGVPAHFRGSGSGTSYSLTISGMEAEDAATYYCQQWSSNPFTFGSGTKLEINGGGGTDKTHTCPPCPAPELLGGPSVFLFPPKPKDTLMISRTPEVTCVVVDVSHEDPEVKFNWYVDGVEVHNAKTKPREEQYNSTYRVVSVLTVLHQDWLNGKEYKCKVSNKALPAPIEKTISKAKGQPREPQVYTLPPSRDELTKNQVSLTCLVKGFYPSDIAVEWESNGQPENNYKTTPPVLDSDGSFFLYSKLTVDKSRWQQGNVFSCSVMHEALHNHYTQKSLSLSPGK

SEQ ID NO: 53 - protein, 477 aa, Artificial Sequence
  SEQ ID NO: 53 - scFv fragment  humanized OKT3 VH5-VL3 - human IgG1 Fc fusion
EVQLVESGGGLVQPGGSLRLSCAASGYTFTRYTMHWVRQAPGKGLEWVGYINPSRGYTRYADSVKGRFTLSTDKSKNTAYLQMNSLRAEDTAVYYCARYYDDHYCLDYWGQGTLVTVSSGGGGSGGGGSGGGGSGGGASDIQLTQSPSSLSASVGDRVTITCRASSSVSYVAWYQQKPGKAPKLLIYDTSKLYSGVPSRFSGSRSGTDYTLTISSLQPEDFATYYCQQWSSNPPTFGQGTKVEIKGGGGTDKTHTCPPCPAPELLGGPSVFLFPPKPKDTLMISRTPEVTCVVVDVSHEDPEVKFNWYVDGVEVHNAKTKPREEQYNSTYRVVSVLTVLHQDWLNGKEYKCKVSNKALPAPIEKTISKAKGQPREPQVYTLPPSRDELTKNQVSLTCLVKGFYPSDIAVEWESNGQPENNYKTTPPVLDSDGSFFLYSKLTVDKSRWQQGNVFSCSVMHEALHNHYTQKSLSLSPGK

SEQ ID NO: 54 - protein, 477 aa, Artificial Sequence
  SEQ ID NO: 54 - scFv fragment  humanized OKT3 VH6-VL4 - human IgG1 Fc fusion
EVQLVESGGGLVQPGGSLRLSCAASGYTFTRYTMHWVRQAPGKGLEWIGYINPSRGYTRYADSVKGRFTLSTDKSKNTAYLQMNSLRAEDTAVYYCARYYDDHYCLDYWGQGTLVTVSSGGGGSGGGGSGGGGSGGGASDIQLTQSPSSLSASVGDRVTITCRASSSVSYVAWYQQKPGKAPKRWIYDTSKLYSGVPSRFSGSRSGTDYTLTISSLQPEDFATYYCQQWSSNPPTFGQGTKVEIKGGGGTDKTHTCPPCPAPELLGGPSVFLFPPKPKDTLMISRTPEVTCVVVDVSHEDPEVKFNWYVDGVEVHNAKTKPREEQYNSTYRVVSVLTVLHQDWLNGKEYKCKVSNKALPAPIEKTISKAKGQPREPQVYTLPPSRDELTKNQVSLTCLVKGFYPSDIAVEWESNGQPENNYKTTPPVLDSDGSFFLYSKLTVDKSRWQQGNVFSCSVMHEALHNHYTQKSLSLSPGK

SEQ ID NO: 55 - protein, 477 aa, Artificial Sequence
  SEQ ID NO: 55 - scFv fragment  humanized OKT3 VH6-VL5 - human IgG1 Fc fusion
EVQLVESGGGLVQPGGSLRLSCAASGYTFTRYTMHWVRQAPGKGLEWIGYINPSRGYTRYADSVKGRFTLSTDKSKNTAYLQMNSLRAEDTAVYYCARYYDDHYCLDYWGQGTLVTVSSGGGGSGGGGSGGGGSGGGASDIQLTQSPSSLSASVGDRVTITCRASSSVSYMNWYQQKPGKAPKLLIYDTSKLYSGVPSRFSGSRSGTDYTLTISSLQPEDFATYYCQQWSSNPPTFGQGTKVEIKGGGGTDKTHTCPPCPAPELLGGPSVFLFPPKPKDTLMISRTPEVTCVVVDVSHEDPEVKFNWYVDGVEVHNAKTKPREEQYNSTYRVVSVLTVLHQDWLNGKEYKCKVSNKALPAPIEKTISKAKGQPREPQVYTLPPSRDELTKNQVSLTCLVKGFYPSDIAVEWESNGQPENNYKTTPPVLDSDGSFFLYSKLTVDKSRWQQGNVFSCSVMHEALHNHYTQKSLSLSPGK

SEQ ID NO: 56 - protein, 477 aa, Artificial Sequence
  SEQ ID NO: 56 - scFv fragment  humanized OKT3 VH8-VL4 - human IgG1 Fc fusion
EVQLVESGGGLVQPGGSLRLSCAASGYTFTRYTMHWVRQAPGKGLEWIGYINPSRGYTYYADSVKGRFTLSTDKSKNTAYLQMNSLRAEDTAVYYCARYYDDHYCLDYWGQGTLVTVSSGGGGSGGGGSGGGGSGGGASDIQLTQSPSSLSASVGDRVTITCRASSSVSYVAWYQQKPGKAPKRWIYDTSKLYSGVPSRFSGSRSGTDYTLTISSLQPEDFATYYCQQWSSNPPTFGQGTKVEIKGGGGTDKTHTCPPCPAPELLGGPSVFLFPPKPKDTLMISRTPEVTCVVVDVSHEDPEVKFNWYVDGVEVHNAKTKPREEQYNSTYRVVSVLTVLHQDWLNGKEYKCKVSNKALPAPIEKTISKAKGQPREPQVYTLPPSRDELTKNQVSLTCLVKGFYPSDIAVEWESNGQPENNYKTTPPVLDSDGSFFLYSKLTVDKSRWQQGNVFSCSVMHEALHNHYTQKSLSLSPGK

SEQ ID NO: 57 - protein, 477 aa, Artificial Sequence
  SEQ ID NO: 57 - scFv fragment  humanized OKT3 VH8-VL8 - human IgG1 Fc fusion
EVQLVESGGGLVQPGGSLRLSCAASGYTFTRYTMHWVRQAPGKGLEWIGYINPSRGYTYYADSVKGRFTLSTDKSKNTAYLQMNSLRAEDTAVYYCARYYDDHYCLDYWGQGTLVTVSSGGGGSGGGGSGGGGSGGGASDIQLTQSPSSLSASVGDRVTITCRASSSVSYVAWYQQKPGKAPKRWIYDTSKLYSGVPSRFSGSGSGTDYTLTISSLQPEDFATYYCQQWSSNPPTFGQGTKVEIKGGGGTDKTHTCPPCPAPELLGGPSVFLFPPKPKDTLMISRTPEVTCVVVDVSHEDPEVKFNWYVDGVEVHNAKTKPREEQYNSTYRVVSVLTVLHQDWLNGKEYKCKVSNKALPAPIEKTISKAKGQPREPQVYTLPPSRDELTKNQVSLTCLVKGFYPSDIAVEWESNGQPENNYKTTPPVLDSDGSFFLYSKLTVDKSRWQQGNVFSCSVMHEALHNHYTQKSLSLSPGK

SEQ ID NO: 58 - protein, 245 aa, Artificial Sequence
  SEQ ID NO: 58 - scFv fragment  humanized OKT3 VH8-VL4
EVQLVESGGGLVQPGGSLRLSCAASGYTFTRYTMHWVRQAPGKGLEWIGYINPSRGYTYYADSVKGRFTLSTDKSKNTAYLQMNSLRAEDTAVYYCARYYDDHYCLDYWGQGTLVTVSSGGGGSGGGGSGGGGSGGGASDIQLTQSPSSLSASVGDRVTITCRASSSVSYVAWYQQKPGKAPKRWIYDTSKLYSGVPSRFSGSRSGTDYTLTISSLQPEDFATYYCQQWSSNPPTFGQGTKVEIK

SEQ ID NO: 59 - protein, 245 aa, Artificial Sequence
  SEQ ID NO: 59 - scFv fragment  humanized OKT3 VH8-VL8
EVQLVESGGGLVQPGGSLRLSCAASGYTFTRYTMHWVRQAPGKGLEWIGYINPSRGYTYYADSVKGRFTLSTDKSKNTAYLQMNSLRAEDTAVYYCARYYDDHYCLDYWGQGTLVTVSSGGGGSGGGGSGGGGSGGGASDIQLTQSPSSLSASVGDRVTITCRASSSVSYVAWYQQKPGKAPKRWIYDTSKLYSGVPSRFSGSGSGTDYTLTISSLQPEDFATYYCQQWSSNPPTFGQGTKVEIK

SEQ ID NO: 60 - protein, 125 aa, Artificial Sequence
  SEQ ID NO: 60 - Mouse anti-human CD3 epsilon SP34 VH domain
EVQLVESGGGLVQPKGSLKLSCAASGFTFNTYAMNWVRQAPGKGLEWVARIRSKYNNYATYYADSVKDRFTISRDDSQSILYLQMNNLKTEDTAMYYCVRHGNFGNSYVSWFAYWGQGTLVTVSA

SEQ ID NO: 61 - protein, 109 aa, Artificial Sequence
  SEQ ID NO: 61 - Mouse anti-human CD3 epsilon SP34 VL domain
QAVVTQESALTTSPGETVTLTCRSSTGAVTTSNYANWVQEKPDHLFTGLIGGTNKRAPGVPARFSGSLIGDKAALTITGAQTEDEAIYFCALWYSNLWVFGGGTKLTVL

SEQ ID NO: 62 - protein, 455 aa, Artificial Sequence
  SEQ ID NO: 62 - Chimeric SP34 heavy chain IgG1
EVQLVESGGGLVQPKGSLKLSCAASGFTFNTYAMNWVRQAPGKGLEWVARIRSKYNNYATYYADSVKDRFTISRDDSQSILYLQMNNLKTEDTAMYYCVRHGNFGNSYVSWFAYWGQGTLVTVSAASTKGPSVFPLAPSSKSTSGGTAALGCLVKDYFPEPVTVSWNSGALTSGVHTFPAVLQSSGLYSLSSVVTVPSSSLGTQTYICNVNHKPSNTKVDKKVEPKSCDKTHTCPPCPAPELLGGPSVFLFPPKPKDTLMISRTPEVTCVVVDVSHEDPEVKFNWYVDGVEVHNAKTKPREEQYNSTYRVVSVLTVLHQDWLNGKEYKCKVSNKALPAPIEKTISKAKGQPREPQVYTLPPSRDELTKNQVSLTCLVKGFYPSDIAVEWESNGQPENNYKTTPPVLDSDGSFFLYSKLTVDKSRWQQGNVFSCSVMHEALHNHYTQKSLSLSPGK

SEQ ID NO: 63 - protein, 216 aa, Artificial Sequence
  SEQ ID NO: 63 - Chimeric SP34 light chain (mouse V lambda - human lambda constant domain)
QAVVTQESALTTSPGETVTLTCRSSTGAVTTSNYANWVQEKPDHLFTGLIGGTNKRAPGVPARFSGSLIGDKAALTITGAQTEDEAIYFCALWYSNLWVFGGGTKLTVLRTVAAPSVFIFPPSDEQLKSGTASVVCLLNNFYPREAKVQWKVDNALQSGNSQESVTEQDSKDSTYSLSSTLTLSKADYEKHKVYACEVTHQGLSSPVTKSFNRGEC

SEQ ID NO: 64 - protein, 455 aa, Artificial Sequence
  SEQ ID NO: 64 - SP34 humanized heavy chain with VH1 domain
EVQLVESGGGLVQPGGSLRLSCAASGFTFNTYAMNWVRQAPGKGLEWVARIRSKYNNYATYYADSVKGRFTISRDDSKNTLYLQMNSLRAEDTAVYYCVRHGNFGNSYVSWFAYWGQGTTVTVSSASTKGPSVFPLAPSSKSTSGGTAALGCLVKDYFPEPVTVSWNSGALTSGVHTFPAVLQSSGLYSLSSVVTVPSSSLGTQTYICNVNHKPSNTKVDKKVEPKSCDKTHTCPPCPAPELLGGPSVFLFPPKPKDTLMISRTPEVTCVVVDVSHEDPEVKFNWYVDGVEVHNAKTKPREEQYNSTYRVVSVLTVLHQDWLNGKEYKCKVSNKALPAPIEKTISKAKGQPREPQVYTLPPSRDELTKNQVSLTCLVKGFYPSDIAVEWESNGQPENNYKTTPPVLDSDGSFFLYSKLTVDKSRWQQGNVFSCSVMHEALHNHYTQKSLSLSPGK

SEQ ID NO: 65 - protein, 455 aa, Artificial Sequence
  SEQ ID NO: 65 - SP34 humanized heavy chain with VH2 domain
EVQLVESGGGLVQPGGSLRLSCAASGFTFNTYAMNWVRQAPGKGLEWVARIRSKYNNYATYYADSVKSRFTISRDDSKNTLYLQMNSLRAEDTAVYYCVRHGNFGNSYVSWFAYWGQGTTVTVSSASTKGPSVFPLAPSSKSTSGGTAALGCLVKDYFPEPVTVSWNSGALTSGVHTFPAVLQSSGLYSLSSVVTVPSSSLGTQTYICNVNHKPSNTKVDKKVEPKSCDKTHTCPPCPAPELLGGPSVFLFPPKPKDTLMISRTPEVTCVVVDVSHEDPEVKFNWYVDGVEVHNAKTKPREEQYNSTYRVVSVLTVLHQDWLNGKEYKCKVSNKALPAPIEKTISKAKGQPREPQVYTLPPSRDELTKNQVSLTCLVKGFYPSDIAVEWESNGQPENNYKTTPPVLDSDGSFFLYSKLTVDKSRWQQGNVFSCSVMHEALHNHYTQKSLSLSPGK

SEQ ID NO: 66 - protein, 455 aa, Artificial Sequence
  SEQ ID NO: 66 - SP34 humanized heavy chain with VH3 domain
EVQLVESGGGLVQPGGSLRLSCAASGFTFNTYAMNWVRQAPGKGLEWVARIRSKYNNYATYYADSVKSRFTISRDDSKNTLYLQMNSLRAEDTAVYYCVRHGNFGNSYVSYFAYWGQGTTVTVSSASTKGPSVFPLAPSSKSTSGGTAALGCLVKDYFPEPVTVSWNSGALTSGVHTFPAVLQSSGLYSLSSVVTVPSSSLGTQTYICNVNHKPSNTKVDKKVEPKSCDKTHTCPPCPAPELLGGPSVFLFPPKPKDTLMISRTPEVTCVVVDVSHEDPEVKFNWYVDGVEVHNAKTKPREEQYNSTYRVVSVLTVLHQDWLNGKEYKCKVSNKALPAPIEKTISKAKGQPREPQVYTLPPSRDELTKNQVSLTCLVKGFYPSDIAVEWESNGQPENNYKTTPPVLDSDGSFFLYSKLTVDKSRWQQGNVFSCSVMHEALHNHYTQKSLSLSPGK

SEQ ID NO: 67 - protein, 455 aa, Artificial Sequence
  SEQ ID NO: 67 - SP34 humanized heavy chain with VH4 domain
EVQLVESGGGLVQPGGSLRLSCAASGFTFNTYAMNWVRQAPGKGLEWVARIRSKYNNYATYYADSVKSRFTISRDDSKNTLYLQMNSLRAEDTAVYYCVRHGNFGNSYVSFFAYWGQGTTVTVSSASTKGPSVFPLAPSSKSTSGGTAALGCLVKDYFPEPVTVSWNSGALTSGVHTFPAVLQSSGLYSLSSVVTVPSSSLGTQTYICNVNHKPSNTKVDKKVEPKSCDKTHTCPPCPAPELLGGPSVFLFPPKPKDTLMISRTPEVTCVVVDVSHEDPEVKFNWYVDGVEVHNAKTKPREEQYNSTYRVVSVLTVLHQDWLNGKEYKCKVSNKALPAPIEKTISKAKGQPREPQVYTLPPSRDELTKNQVSLTCLVKGFYPSDIAVEWESNGQPENNYKTTPPVLDSDGSFFLYSKLTVDKSRWQQGNVFSCSVMHEALHNHYTQKSLSLSPGK

SEQ ID NO: 68 - protein, 455 aa, Artificial Sequence
  SEQ ID NO: 68 - SP34 humanized heavy chain with VH5 domain
EVQLVESGGGLVQPGGSLRLSCAASGFTFNTYAMNWVRQAPGKGLEWVARIRSKYNNYATYYADSVKGRFTISRDDSKNTLYLQMNSLRAEDTAVYYCVRHGNFGNSYVSYFAYWGQGTTVTVSSASTKGPSVFPLAPSSKSTSGGTAALGCLVKDYFPEPVTVSWNSGALTSGVHTFPAVLQSSGLYSLSSVVTVPSSSLGTQTYICNVNHKPSNTKVDKKVEPKSCDKTHTCPPCPAPELLGGPSVFLFPPKPKDTLMISRTPEVTCVVVDVSHEDPEVKFNWYVDGVEVHNAKTKPREEQYNSTYRVVSVLTVLHQDWLNGKEYKCKVSNKALPAPIEKTISKAKGQPREPQVYTLPPSRDELTKNQVSLTCLVKGFYPSDIAVEWESNGQPENNYKTTPPVLDSDGSFFLYSKLTVDKSRWQQGNVFSCSVMHEALHNHYTQKSLSLSPGK

SEQ ID NO: 69 - protein, 217 aa, Artificial Sequence
  SEQ ID NO: 69 - SP34 humanized light chain with VL1 domain
EAVVTQSPATLSVSPGERATLSCRSSTGAVTTSNYANWVQEKPGQAFRGLIGGANKRAPGVPARFSGSLSGDEATLTISSLQSEDFAVYFCQLWYSNLWVFGQGTKLEIKRTVAAPSVFIFPPSDEQLKSGTASVVCLLNNFYPREAKVQWKVDNALQSGNSQESVTEQDSKDSTYSLSSTLTLSKADYEKHKVYACEVTHQGLSSPVTKSFNRGEC

SEQ ID NO: 70 - protein, 217 aa, Artificial Sequence
  SEQ ID NO: 70 - SP34 humanized light chain with VL2 domain
EAVVTQSPATLSVSPGERATLSCRSSTGAVTTSNYANWVQEKPGQAFRGLIGGANKRAPGVPARFSGSLSGDEATLTISSLQSEDFAVYFCALWYSNLWVFGQGTKLEIKRTVAAPSVFIFPPSDEQLKSGTASVVCLLNNFYPREAKVQWKVDNALQSGNSQESVTEQDSKDSTYSLSSTLTLSKADYEKHKVYACEVTHQGLSSPVTKSFNRGEC

SEQ ID NO: 71 - protein, 216 aa, Artificial Sequence
  SEQ ID NO: 71 - SP34 humanized light chain with VL3 domain
EAVVTQSATLSVSPGERATLSCRSSTGAVTTSNYANWVQEKPGQAFRGLIGGANKRAPGVPARFSGSLSGDEATLTISSLQSEDFAVYFCQLWYSNLWVFGQGTKLEIKRTVAAPSVFIFPPSDEQLKSGTASVVCLLNNFYPREAKVQWKVDNALQSGNSQESVTEQDSKDSTYSLSSTLTLSKADYEKHKVYACEVTHQGLSSPVTKSFNRGEC

SEQ ID NO: 72 - protein, 216 aa, Artificial Sequence
  SEQ ID NO: 72 - SP34 humanized light chain with VL4 domain
EAVVTQSATLSVSPGERATLSCRSSTGAVTTSNYANWVQEKPGQAFRGLIGGANKRAPGVPARFSGSLSGDEATLTISSLQSEDFAVYFCALWYSNLWVFGQGTKLEIKRTVAAPSVFIFPPSDEQLKSGTASVVCLLNNFYPREAKVQWKVDNALQSGNSQESVTEQDSKDSTYSLSSTLTLSKADYEKHKVYACEVTHQGLSSPVTKSFNRGEC

SEQ ID NO: 73 - protein, 217 aa, Artificial Sequence
  SEQ ID NO: 73 - SP34 humanized light chain with VL5 domain
EIVVTQSPATLSVSPGERATLSCRSSTGAVTTSNYANWVQEKPGQAFRGLIGGANKRAPGVPARFSGSLSGDEATLTISSLQSEDFAVYFCALWYSNLWVFGQGTKLEIKRTVAAPSVFIFPPSDEQLKSGTASVVCLLNNFYPREAKVQWKVDNALQSGNSQESVTEQDSKDSTYSLSSTLTLSKADYEKHKVYACEVTHQGLSSPVTKSFNRGEC

SEQ ID NO: 74 - protein, 217 aa, Artificial Sequence
  SEQ ID NO: 74 - SP34 humanized light chain with VL6 domain
EAVVTQSPATLSVSPGERATLSCRSSTGAVTTSNYANWVQEKPGQAPRGLIGGANKRAPGVPARFSGSLSGDEATLTISSLQSEDFAVYFCALWYSNLWVFGQGTKLEIKRTVAAPSVFIFPPSDEQLKSGTASVVCLLNNFYPREAKVQWKVDNALQSGNSQESVTEQDSKDSTYSLSSTLTLSKADYEKHKVYACEVTHQGLSSPVTKSFNRGEC

SEQ ID NO: 75 - protein, 217 aa, Artificial Sequence
  SEQ ID NO: 75 - SP34 humanized light chain with VL7 domain
EIVVTQSPATLSVSPGERATLSCRSSTGAVTTSNYANWVQEKPGQAPRGLIGGANKRAPGVPARFSGSLSGDEATLTISSLQSEDFAVYFCALWYSNLWVFGQGTKLEIKRTVAAPSVFIFPPSDEQLKSGTASVVCLLNNFYPREAKVQWKVDNALQSGNSQESVTEQDSKDSTYSLSSTLTLSKADYEKHKVYACEVTHQGLSSPVTKSFNRGEC

SEQ ID NO: 76 - protein, 217 aa, Artificial Sequence
  SEQ ID NO: 76 - SP34 humanized light chain with VL8 domain
EAVVTQSPATLSVSPGERATLSCRSSTGAVTTSNYANWVQEKPGQAFRGLIGGANKRAPGVPARFSGSGSGDEATLTISSLQSEDFAVYFCALWYSNLWVFGQGTKLEIKRTVAAPSVFIFPPSDEQLKSGTASVVCLLNNFYPREAKVQWKVDNALQSGNSQESVTEQDSKDSTYSLSSTLTLSKADYEKHKVYACEVTHQGLSSPVTKSFNRGEC

SEQ ID NO: 77 - protein, 217 aa, Artificial Sequence
  SEQ ID NO: 77 - SP34 humanized light chain with VL9 domain
EIVVTQSPATLSVSPGERATLSCRSSTGAVTTSNYANWVQEKPGQAFRGLIGGANKRAPGVPARFSGSGSGDEATLTISSLQSEDFAVYFCALWYSNLWVFGQGTKLEIKRTVAAPSVFIFPPSDEQLKSGTASVVCLLNNFYPREAKVQWKVDNALQSGNSQESVTEQDSKDSTYSLSSTLTLSKADYEKHKVYACEVTHQGLSSPVTKSFNRGEC

SEQ ID NO: 78 - protein, 217 aa, Artificial Sequence
  SEQ ID NO: 78 - SP34 humanized light chain with VL10 domain
EAVVTQSPATLSVSPGERATLSCRSSTGAVTTSNYANWVQEKPGQAFRGLIGGANKRAPGVPARFSGSLSGDEATLTISSLQSEDFAVYYCALWYSNLWVFGQGTKLEIKRTVAAPSVFIFPPSDEQLKSGTASVVCLLNNFYPREAKVQWKVDNALQSGNSQESVTEQDSKDSTYSLSSTLTLSKADYEKHKVYACEVTHQGLSSPVTKSFNRGEC

SEQ ID NO: 79 - protein, 217 aa, Artificial Sequence
  SEQ ID NO: 79 - SP34 humanized light chain with VL11 domain
EAVVTQSPATLSVSPGERATLSCRSSTGAVTTSNYANWVQEKPGQAFRGLIGGANKRAPGVPARFSGSGSGTEATLTISSLQSEDFAVYFCALWYSNLWVFGQGTKLEIKRTVAAPSVFIFPPSDEQLKSGTASVVCLLNNFYPREAKVQWKVDNALQSGNSQESVTEQDSKDSTYSLSSTLTLSKADYEKHKVYACEVTHQGLSSPVTKSFNRGEC

SEQ ID NO: 80 - protein, 217 aa, Artificial Sequence
  SEQ ID NO: 80 - SP34 humanized light chain with VL12 domain
EAVVTQSPATLSVSPGERATLSCRSSTGAVTTSNYANWVQEKPGQAFRGLIGGANKRAPGVPARFSGSLSGTEATLTISSLQSEDFAVYFCALWYSNLWVFGQGTKLEIKRTVAAPSVFIFPPSDEQLKSGTASVVCLLNNFYPREAKVQWKVDNALQSGNSQESVTEQDSKDSTYSLSSTLTLSKADYEKHKVYACEVTHQGLSSPVTKSFNRGEC

SEQ ID NO: 81 - protein, 217 aa, Artificial Sequence
  SEQ ID NO: 81 - SP34 humanized light chain with VL13 domain
EAVVTQSPATLSVSPGERATLSCRASTGAVTTSNYANWVQEKPGQAFRGLIGGANKRAPGVPARFSGSLSGDEATLTISSLQSEDFAVYFCALWYSNLWVFGQGTKLEIKRTVAAPSVFIFPPSDEQLKSGTASVVCLLNNFYPREAKVQWKVDNALQSGNSQESVTEQDSKDSTYSLSSTLTLSKADYEKHKVYACEVTHQGLSSPVTKSFNRGEC

SEQ ID NO: 82 - protein, 217 aa, Artificial Sequence
  SEQ ID NO: 82 - SP34 humanized light chain with VL14 domain
EAVVTQSPATLSVSPGERATLSCRSSTGAVTTSNYANWVQEKPGQAFRLLIGGANKRAPGVPARFSGSLSGDEATLTISSLQSEDFAVYFCALWYSNLWVFGQGTKLEIKRTVAAPSVFIFPPSDEQLKSGTASVVCLLNNFYPREAKVQWKVDNALQSGNSQESVTEQDSKDSTYSLSSTLTLSKADYEKHKVYACEVTHQGLSSPVTKSFNRGEC

SEQ ID NO: 83 - protein, 217 aa, Artificial Sequence
  SEQ ID NO: 83 - SP34 humanized light chain with VL15 domain
EAVVTQSPATLSVSPGERATLSCRSSTGAVTTSNYANWVQQKPGQAFRGLIGGANKRAPGVPARFSGSLSGDEATLTISSLQSEDFAVYFCALWYSNLWVFGQGTKLEIKRTVAAPSVFIFPPSDEQLKSGTASVVCLLNNFYPREAKVQWKVDNALQSGNSQESVTEQDSKDSTYSLSSTLTLSKADYEKHKVYACEVTHQGLSSPVTKSFNRGEC

SEQ ID NO: 84 - protein, 217 aa, Artificial Sequence
  SEQ ID NO: 84 - SP34 humanized light chain with VL16 domain
EIVVTQSPATLSVSPGERATLSCRSSTGAVTTSNYANWVQEKPGQAFRGLIGGANKRAPGVPARFSGSLSGTEATLTISSLQSEDFAVYFCALWYSNLWVFGQGTKLEIKRTVAAPSVFIFPPSDEQLKSGTASVVCLLNNFYPREAKVQWKVDNALQSGNSQESVTEQDSKDSTYSLSSTLTLSKADYEKHKVYACEVTHQGLSSPVTKSFNRGEC

SEQ ID NO: 85 - protein, 217 aa, Artificial Sequence
  SEQ ID NO: 85 - SP34 humanized light chain with VL17 domain
EIVVTQSPATLSVSPGERATLSCRASTGAVTTSNYANWVQEKPGQAFRGLIGGANKRAPGVPARFSGSLSGDEATLTISSLQSEDFAVYFCALWYSNLWVFGQGTKLEIKRTVAAPSVFIFPPSDEQLKSGTASVVCLLNNFYPREAKVQWKVDNALQSGNSQESVTEQDSKDSTYSLSSTLTLSKADYEKHKVYACEVTHQGLSSPVTKSFNRGEC

SEQ ID NO: 86 - protein, 217 aa, Artificial Sequence
  SEQ ID NO: 86 - SP34 humanized light chain with VL18 domain
EIVVTQSPATLSVSPGERATLSCRSSTGAVTTSNYANWVQEKPGQAFRGLIGGANKRAPGVPARFSGSLSGDEATLTISSLQSEDFAVYFCALWYSNLWVFGGGTKLEIKRTVAAPSVFIFPPSDEQLKSGTASVVCLLNNFYPREAKVQWKVDNALQSGNSQESVTEQDSKDSTYSLSSTLTLSKADYEKHKVYACEVTHQGLSSPVTKSFNRGEC

SEQ ID NO: 87 - protein, 217 aa, Artificial Sequence
  SEQ ID NO: 87 - SP34 humanized light chain with VL19 domain
EIVVTQSPATLSVSPGERATLSCRSSTGAVTTSNYANWVQEKPGQAFRGLIGGANKRAPGVPARFSGSLSGTEATLTISSLQSEDFAVYYCALWYSNLWVFGQGTKLEIKRTVAAPSVFIFPPSDEQLKSGTASVVCLLNNFYPREAKVQWKVDNALQSGNSQESVTEQDSKDSTYSLSSTLTLSKADYEKHKVYACEVTHQGLSSPVTKSFNRGEC

SEQ ID NO: 88 - protein, 217 aa, Artificial Sequence
  SEQ ID NO: 88 - SP34 humanized light chain with VL20 domain
EIVVTQSPATLSVSPGERATLSCRSSTGAVTTSNYANWVQQKPGQAFRGLIGGANKRAPGVPARFSGSLSGTEATLTISSLQSEDFAVYYCALWYSNLWVFGQGTKLEIKRTVAAPSVFIFPPSDEQLKSGTASVVCLLNNFYPREAKVQWKVDNALQSGNSQESVTEQDSKDSTYSLSSTLTLSKADYEKHKVYACEVTHQGLSSPVTKSFNRGEC

SEQ ID NO: 89 - protein, 217 aa, Artificial Sequence
  SEQ ID NO: 89 - SP34 humanized light chain with VL21 domain
EIVVTQSPATLSVSPGERATLSCRSSTGAVTTSNYANWVQEKPGQAFRGLIGGANKRAPGVPARFSGSLSGDEATLTISSLQSEDFAVYYCALWYSNLWVFGQGTKLEIKRTVAAPSVFIFPPSDEQLKSGTASVVCLLNNFYPREAKVQWKVDNALQSGNSQESVTEQDSKDSTYSLSSTLTLSKADYEKHKVYACEVTHQGLSSPVTKSFNRGEC

SEQ ID NO: 90 - protein, 217 aa, Artificial Sequence
  SEQ ID NO: 90 - SP34 humanized light chain with VL22 domain
EIVVTQSPATLSVSPGERATLSCRSSTGAVTTSNYANWVQQKPGQAFRGLIGGANKRAPGVPARFSGSLSGDEATLTISSLQSEDFAVYYCALWYSNLWVFGQGTKLEIKRTVAAPSVFIFPPSDEQLKSGTASVVCLLNNFYPREAKVQWKVDNALQSGNSQESVTEQDSKDSTYSLSSTLTLSKADYEKHKVYACEVTHQGLSSPVTKSFNRGEC

SEQ ID NO: 91 - protein, 482 aa, Artificial Sequence
  SEQ ID NO: 91 - scFv fragment  humanized SP34 VH2-VL21 - human IgG1 Fc fusion
EVQLVESGGGLVQPGGSLRLSCAASGFTFNTYAMNWVRQAPGKGLEWVARIRSKYNNYATYYADSVKSRFTISRDDSKNTLYLQMNSLRAEDTAVYYCVRHGNFGNSYVSWFAYWGQGTTVTVSSGGGGSGGGGSGGGGSEIVVTQSPATLSVSPGERATLSCRSSTGAVTTSNYANWVQEKPGQAFRGLIGGANKRAPGVPARFSGSLSGDEATLTISSLQSEDFAVYYCALWYSNLWVFGQGTKLEIKGGGGTDKTHTCPPCPAPELLGGPSVFLFPPKPKDTLMISRTPEVTCVVVDVSHEDPEVKFNWYVDGVEVHNAKTKPREEQYNSTYRVVSVLTVLHQDWLNGKEYKCKVSNKALPAPIEKTISKAKGQPREPQVYTLPPSRDELTKNQVSLTCLVKGFYPSDIAVEWESNGQPENNYKTTPPVLDSDGSFFLYSKLTVDKSRWQQGNVFSCSVMHEALHNHYTQKSLSLSPGK

SEQ ID NO: 92 - protein, 482 aa, Artificial Sequence
  SEQ ID NO: 92 - scFv fragment  humanized SP34 VH3-VL23 - human IgG1 Fc fusion
EVQLVESGGGLVQPGGSLRLSCAASGFTFNTYAMNWVRQAPGKGLEWVARIRSKYNNYATYYADSVKSRFTISRDDSKNTLYLQMNSLRAEDTAVYYCVRHGNFGNSYVSYFAYWGQGTTVTVSSGGGGSGGGGSGGGGSEIVVTQSPATLSVSPGERATLSCRSSTGAVTTSNYANWVQEKPGQAFRGLIGGANKRAPGVPARFSGSLSGDEATLTISSLQSEDFAVYYCALFYSNLWVFGQGTKLEIKGGGGTDKTHTCPPCPAPELLGGPSVFLFPPKPKDTLMISRTPEVTCVVVDVSHEDPEVKFNWYVDGVEVHNAKTKPREEQYNSTYRVVSVLTVLHQDWLNGKEYKCKVSNKALPAPIEKTISKAKGQPREPQVYTLPPSRDELTKNQVSLTCLVKGFYPSDIAVEWESNGQPENNYKTTPPVLDSDGSFFLYSKLTVDKSRWQQGNVFSCSVMHEALHNHYTQKSLSLSPGK

SEQ ID NO: 93 - protein, 482 aa, Artificial Sequence
  SEQ ID NO: 93 - scFv fragment  humanized SP34 VH4-VL23 - human IgG1 Fc fusion
EVQLVESGGGLVQPGGSLRLSCAASGFTFNTYAMNWVRQAPGKGLEWVARIRSKYNNYATYYADSVKSRFTISRDDSKNTLYLQMNSLRAEDTAVYYCVRHGNFGNSYVSFFAYWGQGTTVTVSSGGGGSGGGGSGGGGSEIVVTQSPATLSVSPGERATLSCRSSTGAVTTSNYANWVQEKPGQAFRGLIGGANKRAPGVPARFSGSLSGDEATLTISSLQSEDFAVYYCALFYSNLWVFGQGTKLEIKGGGGTDKTHTCPPCPAPELLGGPSVFLFPPKPKDTLMISRTPEVTCVVVDVSHEDPEVKFNWYVDGVEVHNAKTKPREEQYNSTYRVVSVLTVLHQDWLNGKEYKCKVSNKALPAPIEKTISKAKGQPREPQVYTLPPSRDELTKNQVSLTCLVKGFYPSDIAVEWESNGQPENNYKTTPPVLDSDGSFFLYSKLTVDKSRWQQGNVFSCSVMHEALHNHYTQKSLSLSPGK

SEQ ID NO: 94 - protein, 482 aa, Artificial Sequence
  SEQ ID NO: 94 - scFv fragment  humanized SP34 VH5-VL23 - human IgG1 Fc fusion
EVQLVESGGGLVQPGGSLRLSCAASGFTFNTYAMNWVRQAPGKGLEWVARIRSKYNNYATYYADSVKGRFTISRDDSKNTLYLQMNSLRAEDTAVYYCVRHGNFGNSYVSYFAYWGQGTTVTVSSGGGGSGGGGSGGGGSEIVVTQSPATLSVSPGERATLSCRSSTGAVTTSNYANWVQEKPGQAFRGLIGGANKRAPGVPARFSGSLSGDEATLTISSLQSEDFAVYYCALFYSNLWVFGQGTKLEIKGGGGTDKTHTCPPCPAPELLGGPSVFLFPPKPKDTLMISRTPEVTCVVVDVSHEDPEVKFNWYVDGVEVHNAKTKPREEQYNSTYRVVSVLTVLHQDWLNGKEYKCKVSNKALPAPIEKTISKAKGQPREPQVYTLPPSRDELTKNQVSLTCLVKGFYPSDIAVEWESNGQPENNYKTTPPVLDSDGSFFLYSKLTVDKSRWQQGNVFSCSVMHEALHNHYTQKSLSLSPGK

SEQ ID NO: 95 - protein, 482 aa, Artificial Sequence
  SEQ ID NO: 95 - scFv fragment  humanized SP34 VH1-VL27 - human IgG1 Fc fusion
EVQLVESGGGLVQPGGSLRLSCAASGFTFNTYAMNWVRQAPGKGLEWVARIRSKYNNYATYYADSVKGRFTISRDDSKNTLYLQMNSLRAEDTAVYYCVRHGNFGNSYVSWFAYWGQGTTVTVSSGGGGSGGGGSGGGGSEIVVTQSPATLSVSPGERATLSCRSSTGAVTTSAAANWVQEKPGQAFRGLIGGANKRAPGVPARFSGSLSGDEATLTISSLQSEDFAVYYCALWYSNLWVFGQGTKLEIKGGGGTDKTHTCPPCPAPELLGGPSVFLFPPKPKDTLMISRTPEVTCVVVDVSHEDPEVKFNWYVDGVEVHNAKTKPREEQYNSTYRVVSVLTVLHQDWLNGKEYKCKVSNKALPAPIEKTISKAKGQPREPQVYTLPPSRDELTKNQVSLTCLVKGFYPSDIAVEWESNGQPENNYKTTPPVLDSDGSFFLYSKLTVDKSRWQQGNVFSCSVMHEALHNHYTQKSLSLSPGK

SEQ ID NO: 96 - protein, 482 aa, Artificial Sequence
  SEQ ID NO: 96 - scFv fragment  humanized SP34 VH1-VL28 - human IgG1 Fc fusion
EVQLVESGGGLVQPGGSLRLSCAASGFTFNTYAMNWVRQAPGKGLEWVARIRSKYNNYATYYADSVKGRFTISRDDSKNTLYLQMNSLRAEDTAVYYCVRHGNFGNSYVSWFAYWGQGTTVTVSSGGGGSGGGGSGGGGSEIVVTQSPATLSVSPGERATLSCRSSTGAVTTSNYANWVQEKPGQAFRGLIGGAAARAPGVPARFSGSLSGDEATLTISSLQSEDFAVYYCALWYSNLWVFGQGTKLEIKGGGGTDKTHTCPPCPAPELLGGPSVFLFPPKPKDTLMISRTPEVTCVVVDVSHEDPEVKFNWYVDGVEVHNAKTKPREEQYNSTYRVVSVLTVLHQDWLNGKEYKCKVSNKALPAPIEKTISKAKGQPREPQVYTLPPSRDELTKNQVSLTCLVKGFYPSDIAVEWESNGQPENNYKTTPPVLDSDGSFFLYSKLTVDKSRWQQGNVFSCSVMHEALHNHYTQKSLSLSPGK

SEQ ID NO: 97 - protein, 482 aa, Artificial Sequence
  SEQ ID NO: 97 - scFv fragment  humanized SP34 VH1-VL29 - human IgG1 Fc fusion
EVQLVESGGGLVQPGGSLRLSCAASGFTFNTYAMNWVRQAPGKGLEWVARIRSKYNNYATYYADSVKGRFTISRDDSKNTLYLQMNSLRAEDTAVYYCVRHGNFGNSYVSWFAYWGQGTTVTVSSGGGGSGGGGSGGGGSEIVVTQSPATLSVSPGERATLSCRSSTGAVTTSNYANWVQEKPGQAFRGLIGGANKAAAGVPARFSGSLSGDEATLTISSLQSEDFAVYYCALWYSNLWVFGQGTKLEIKGGGGTDKTHTCPPCPAPELLGGPSVFLFPPKPKDTLMISRTPEVTCVVVDVSHEDPEVKFNWYVDGVEVHNAKTKPREEQYNSTYRVVSVLTVLHQDWLNGKEYKCKVSNKALPAPIEKTISKAKGQPREPQVYTLPPSRDELTKNQVSLTCLVKGFYPSDIAVEWESNGQPENNYKTTPPVLDSDGSFFLYSKLTVDKSRWQQGNVFSCSVMHEALHNHYTQKSLSLSPGK

SEQ ID NO: 98 - protein, 482 aa, Artificial Sequence
  SEQ ID NO: 98 - scFv fragment  humanized SP34 VH1-VL30 - human IgG1 Fc fusion
EVQLVESGGGLVQPGGSLRLSCAASGFTFNTYAMNWVRQAPGKGLEWVARIRSKYNNYATYYADSVKGRFTISRDDSKNTLYLQMNSLRAEDTAVYYCVRHGNFGNSYVSWFAYWGQGTTVTVSSGGGGSGGGGSGGGGSEIVVTQSPATLSVSPGERATLSCRSSTGAVTTSNYANWVQEKPGQAFRGLIGGANKRAPGVPARFSGSLSGDEATLTISSLQSEDFAVYYCALWAANLWVFGQGTKLEIKGGGGTDKTHTCPPCPAPELLGGPSVFLFPPKPKDTLMISRTPEVTCVVVDVSHEDPEVKFNWYVDGVEVHNAKTKPREEQYNSTYRVVSVLTVLHQDWLNGKEYKCKVSNKALPAPIEKTISKAKGQPREPQVYTLPPSRDELTKNQVSLTCLVKGFYPSDIAVEWESNGQPENNYKTTPPVLDSDGSFFLYSKLTVDKSRWQQGNVFSCSVMHEALHNHYTQKSLSLSPGK

SEQ ID NO: 99 - protein, 482 aa, Artificial Sequence
  SEQ ID NO: 99 - scFv fragment  humanized SP34 VH1-VL31 - human IgG1 Fc fusion
EVQLVESGGGLVQPGGSLRLSCAASGFTFNTYAMNWVRQAPGKGLEWVARIRSKYNNYATYYADSVKGRFTISRDDSKNTLYLQMNSLRAEDTAVYYCVRHGNFGNSYVSWFAYWGQGTTVTVSSGGGGSGGGGSGGGGSEIVVTQSPATLSVSPGERATLSCRSSTGAVTTSNYANWVQEKPGQAFRGLIGGANKRAPGVPARFSGSLSGDEATLTISSLQSEDFAVYYCALWYSALWVFGQGTKLEIKGGGGTDKTHTCPPCPAPELLGGPSVFLFPPKPKDTLMISRTPEVTCVVVDVSHEDPEVKFNWYVDGVEVHNAKTKPREEQYNSTYRVVSVLTVLHQDWLNGKEYKCKVSNKALPAPIEKTISKAKGQPREPQVYTLPPSRDELTKNQVSLTCLVKGFYPSDIAVEWESNGQPENNYKTTPPVLDSDGSFFLYSKLTVDKSRWQQGNVFSCSVMHEALHNHYTQKSLSLSPGK

SEQ ID NO: 100 - protein, 482 aa, Artificial Sequence
  SEQ ID NO: 100 - scFv fragment  humanized SP34 VH5-VL32 - human IgG1 Fc fusion
EVQLVESGGGLVQPGGSLRLSCAASGFTFNTYAMNWVRQAPGKGLEWVARIRSKYNNYATYYADSVKGRFTISRDDSKNTLYLQMNSLRAEDTAVYYCVRHGNFGNSYVSYFAYWGQGTTVTVSSGGGGSGGGGSGGGGSEIVVTQSPATLSVSPGERATLSCRSSTGAVTAANYANWVQEKPGQAFRGLIGGANKRAPGVPARFSGSLSGDEATLTISSLQSEDFAVYYCALFYSNLWVFGQGTKLEIKGGGGTDKTHTCPPCPAPELLGGPSVFLFPPKPKDTLMISRTPEVTCVVVDVSHEDPEVKFNWYVDGVEVHNAKTKPREEQYNSTYRVVSVLTVLHQDWLNGKEYKCKVSNKALPAPIEKTISKAKGQPREPQVYTLPPSRDELTKNQVSLTCLVKGFYPSDIAVEWESNGQPENNYKTTPPVLDSDGSFFLYSKLTVDKSRWQQGNVFSCSVMHEALHNHYTQKSLSLSPGK

SEQ ID NO: 101 - protein, 125 aa, Artificial Sequence
  SEQ ID NO: 101 - SP34 humanized VH1 domain
EVQLVESGGGLVQPGGSLRLSCAASGFTFNTYAMNWVRQAPGKGLEWVARIRSKYNNYATYYADSVKGRFTISRDDSKNTLYLQMNSLRAEDTAVYYCVRHGNFGNSYVSWFAYWGQGTTVTVSS

SEQ ID NO: 102 - protein, 125 aa, Artificial Sequence
  SEQ ID NO: 102 - SP34 humanized VH2 domain
EVQLVESGGGLVQPGGSLRLSCAASGFTFNTYAMNWVRQAPGKGLEWVARIRSKYNNYATYYADSVKSRFTISRDDSKNTLYLQMNSLRAEDTAVYYCVRHGNFGNSYVSWFAYWGQGTTVTVSS

SEQ ID NO: 103 - protein, 125 aa, Artificial Sequence
  SEQ ID NO: 103 - SP34 humanized VH3 domain
EVQLVESGGGLVQPGGSLRLSCAASGFTFNTYAMNWVRQAPGKGLEWVARIRSKYNNYATYYADSVKSRFTISRDDSKNTLYLQMNSLRAEDTAVYYCVRHGNFGNSYVSYFAYWGQGTTVTVSS

SEQ ID NO: 104 - protein, 125 aa, Artificial Sequence
  SEQ ID NO: 104 - SP34 humanized VH5 domain
EVQLVESGGGLVQPGGSLRLSCAASGFTFNTYAMNWVRQAPGKGLEWVARIRSKYNNYATYYADSVKGRFTISRDDSKNTLYLQMNSLRAEDTAVYYCVRHGNFGNSYVSYFAYWGQGTTVTVSS

SEQ ID NO: 105 - protein, 110 aa, Artificial Sequence
  SEQ ID NO: 105 - SP34 humanized VL21 domain
EIVVTQSPATLSVSPGERATLSCRSSTGAVTTSNYANWVQEKPGQAFRGLIGGANKRAPGVPARFSGSLSGDEATLTISSLQSEDFAVYYCALWYSNLWVFGQGTKLEIK

SEQ ID NO: 106 - protein, 110 aa, Artificial Sequence
  SEQ ID NO: 106 - SP34 humanized VL32 domain
EIVVTQSPATLSVSPGERATLSCRSSTGAVTAANYANWVQEKPGQAFRGLIGGANKRAPGVPARFSGSLSGDEATLTISSLQSEDFAVYYCALFYSNLWVFGQGTKLEIK

SEQ ID NO: 107 - protein, 242 aa, Artificial Sequence
  SEQ ID NO: 107 - Humanized anti-HER2 antibody 4D5 - scFv fragment
EVQLVESGGGLVQPGGSLRLSCAASGFNIKDTYIHWVRQAPGKGLEWVARIYPTNGYTRYADSVKGRFTISADTSKNTAYLQMNSLRAEDTAVYYCSRWGGDGFYAMDYWGQGTLVTVSSGGGGSGGGGSGGGGSDIQMTQSPSSLSASVGDRVTITCRASQDVNTAVAWYQQKPGKAPKLLIYSASFLYSGVPSRFSGSRSGTDFTLTISSLQPEDFATYYCQQHYTTPPTFGQGTKVEIK

SEQ ID NO: 108 - protein, 120 aa, Artificial Sequence
  SEQ ID NO: 108 - Humanized anti-HER2 antibody 4D5 - FAB  fragment heavy chain (VH-VH1)with VH:G65S substitution
EVQLVESGGGLVQPGGSLRLSCAASGFNIKDTYIHWVRQAPGKGLEWVARIYPTNGYTRYADSVKSRFTISADTSKNTAYLQMNSLRAEDTAVYYCSRWGGDGFYAMDYWGQGTLVTVSS

SEQ ID NO: 109 - protein, 242 aa, Artificial Sequence
  SEQ ID NO: 109 - Humanized anti-HER2 antibody 4D5 - scFv fragment with VH:G65S substitution
EVQLVESGGGLVQPGGSLRLSCAASGFNIKDTYIHWVRQAPGKGLEWVARIYPTNGYTRYADSVKSRFTISADTSKNTAYLQMNSLRAEDTAVYYCSRWGGDGFYAMDYWGQGTLVTVSSGGGGSGGGGSGGGGSDIQMTQSPSSLSASVGDRVTITCRASQDVNTAVAWYQQKPGKAPKLLIYSASFLYSGVPSRFSGSRSGTDFTLTISSLQPEDFATYYCQQHYTTPPTFGQGTKVEIK

SEQ ID NO: 110 - protein, 120 aa, Artificial Sequence
  SEQ ID NO: 110 - Humanized anti-HER2 antibody 4D5 - FAB  fragment heavy chain (VH-VH1)with VH:N82aS substitution
EVQLVESGGGLVQPGGSLRLSCAASGFNIKDTYIHWVRQAPGKGLEWVARIYPTNGYTRYADSVKGRFTISADTSKNTAYLQMSSLRAEDTAVYYCSRWGGDGFYAMDYWGQGTLVTVSS

SEQ ID NO: 111 - protein, 242 aa, Artificial Sequence
  SEQ ID NO: 111 - Humanized anti-HER2 antibody 4D5 - scFv fragment with VH:N82aS substitution
EVQLVESGGGLVQPGGSLRLSCAASGFNIKDTYIHWVRQAPGKGLEWVARIYPTNGYTRYADSVKGRFTISADTSKNTAYLQMSSLRAEDTAVYYCSRWGGDGFYAMDYWGQGTLVTVSSGGGGSGGGGSGGGGSDIQMTQSPSSLSASVGDRVTITCRASQDVNTAVAWYQQKPGKAPKLLIYSASFLYSGVPSRFSGSRSGTDFTLTISSLQPEDFATYYCQQHYTTPPTFGQGTKVEIK

SEQ ID NO: 112 - protein, 109 aa, Artificial Sequence
  SEQ ID NO: 112 - OKT10 mouse VH domain
QVELVESGGSLKLSCAASGFDFSRSWMNWVRQAPGKGLEWIGEINPDSSTINYTTSLKDKFIISRDNAKNTLYLQMTKVRSEDTALYYCARYGNWFPYWGQGTLVTVSS

SEQ ID NO: 113 - protein, 108 aa, Artificial Sequence
  SEQ ID NO: 113 - OKT10 mouse VL domain
DILMTQSQKIMPTSVGDRVSVTCKASQNVDTNVAWYQQKPGQSPKALIYSASYRYSGVPDRFTGSGSGTDFTLTITNVQSEDLAEYFCQQYDSYPLTFGAGTKLDLKR

SEQ ID NO: 114 - protein, 119 aa, Artificial Sequence
  SEQ ID NO: 114 - HB-7 mouse VH domain
KVQLQESGPSLVQPSQRLSITCTVSGFSLISYGVHWVRQSPGKGLEWLGVIWRGGSTDYNAAFMSRLSITKDNSKSQVFFKMNSLQADDTAIYFCAKTLITTGYAMDYWGQGTTVTVSS

SEQ ID NO: 115 - protein, 106 aa, Artificial Sequence
  SEQ ID NO: 115 - HB-7 mouse VL domain
DIELTQSPSSFSVSLGDRVTITCKASEDIYNRLAWYQQKPGNAPRLLISGATSLETGVPSRFSGSGSGKDYTLSITSLQTEDVATYYCQQYWSTPTFGGGTKLEIK

SEQ ID NO: 116 - protein, 119 aa, Artificial Sequence
  SEQ ID NO: 116 - Humanized HB-7 best-fit VH domain
QVQLQESGPGLVKPSETLSLTCTVSGFSLISYGVHWVRQPPGKGLEWLGVIWRGGSTDYNAAFMSRLTISKDNSKNQVSLKLSSVTAADTAVYFCAKTLITTGYAMDYWGQGTLVTVSS

SEQ ID NO: 117 - protein, 106 aa, Artificial Sequence
  SEQ ID NO: 117 - Humanized HB-7 best-fit VL domain
DIQLTQSPSSLSASVGDRVTITCRASEDIYNRLAWYQQKPGKAPKLLISGATSLETGVPSRFSGSGSGKDYTLTISSLQPEDFATYYCQQYWSTPTFGQGTKLEIK

SEQ ID NO: 118 - protein, 449 aa, Artificial Sequence
  SEQ ID NO: 118 - Humanized HB-7 best-fit heavy chain
QVQLQESGPGLVKPSETLSLTCTVSGFSLISYGVHWVRQPPGKGLEWLGVIWRGGSTDYNAAFMSRLTISKDNSKNQVSLKLSSVTAADTAVYFCAKTLITTGYAMDYWGQGTLVTVSSASTKGPSVFPLAPSSKSTSGGTAALGCLVKDYFPEPVTVSWNSGALTSGVHTFPAVLQSSGLYSLSSVVTVPSSSLGTQTYICNVNHKPSNTKVDKKVEPKSCDKTHTCPPCPAPELLGGPSVFLFPPKPKDTLMISRTPEVTCVVVDVSHEDPEVKFNWYVDGVEVHNAKTKPREEQYNSTYRVVSVLTVLHQDWLNGKEYKCKVSNKALPAPIEKTISKAKGQPREPQVYTLPPSRDELTKNQVSLTCLVKGFYPSDIAVEWESNGQPENNYKTTPPVLDSDGSFFLYSKLTVDKSRWQQGNVFSCSVMHEALHNHYTQKSLSLSPGK

SEQ ID NO: 119 - protein, 213 aa, Artificial Sequence
  SEQ ID NO: 119 - Humanized HB-7 best-fit light chain
DIQLTQSPSSLSASVGDRVTITCRASEDIYNRLAWYQQKPGKAPKLLISGATSLETGVPSRFSGSGSGKDYTLTISSLQPEDFATYYCQQYWSTPTFGQGTKLEIKRTVAAPSVFIFPPSDEQLKSGTASVVCLLNNFYPREAKVQWKVDNALQSGNSQESVTEQDSKDSTYSLSSTLTLSKADYEKHKVYACEVTHQGLSSPVTKSFNRGEC

SEQ ID NO: 120 - protein, 449 aa, Artificial Sequence
  SEQ ID NO: 120 - Chimeric HB-7 heavy chain IgG1
KVQLQESGPSLVQPSQRLSITCTVSGFSLISYGVHWVRQSPGKGLEWLGVIWRGGSTDYNAAFMSRLSITKDNSKSQVFFKMNSLQADDTAIYFCAKTLITTGYAMDYWGQGTTVTVSSASTKGPSVFPLAPSSKSTSGGTAALGCLVKDYFPEPVTVSWNSGALTSGVHTFPAVLQSSGLYSLSSVVTVPSSSLGTQTYICNVNHKPSNTKVDKKVEPKSCDKTHTCPPCPAPELLGGPSVFLFPPKPKDTLMISRTPEVTCVVVDVSHEDPEVKFNWYVDGVEVHNAKTKPREEQYNSTYRVVSVLTVLHQDWLNGKEYKCKVSNKALPAPIEKTISKAKGQPREPQVYTLPPSRDELTKNQVSLTCLVKGFYPSDIAVEWESNGQPENNYKTTPPVLDSDGSFFLYSKLTVDKSRWQQGNVFSCSVMHEALHNHYTQKSLSLSPGK

SEQ ID NO: 121 - protein, 213 aa, Artificial Sequence
  SEQ ID NO: 121 - Chimeric HB-7 human kappa light chain
DIELTQSPSSFSVSLGDRVTITCKASEDIYNRLAWYQQKPGNAPRLLISGATSLETGVPSRFSGSGSGKDYTLSITSLQTEDVATYYCQQYWSTPTFGGGTKLEIKRTVAAPSVFIFPPSDEQLKSGTASVVCLLNNFYPREAKVQWKVDNALQSGNSQESVTEQDSKDSTYSLSSTLTLSKADYEKHKVYACEVTHQGLSSPVTKSFNRGEC

SEQ ID NO: 122 - protein, 121 aa, Artificial Sequence
  SEQ ID NO: 122 - 9G7 mouse VH domain
QVTLKESGPGILQPSQTLSLTCSFSGLSLSTSGKGVGWIRQPSGKGLEWLAHIWWDDDKRYNPALKSRLTISKDTSSNQVFLKIASVDTADTATYYCARIELGRSYVMDYWGQGTTVTVSS

SEQ ID NO: 123 - protein, 107 aa, Artificial Sequence
  SEQ ID NO: 123 - 9G7 mouse VL domain
DIVMTQSHKFMSTSVGDRVSISCKASQDVITSVAWFQQKPGQSPKLLIYSASYRYTGVPDRFTGSGSGTDFTFTISSVQAEDLAVYYCQQHYTIPLTFGAGTKLELK

SEQ ID NO: 124 - protein, 451 aa, Artificial Sequence
  SEQ ID NO: 124 - Humanized 9G7 best-fit heavy chain
QVTLKESGPTLVKPTQTLTLTCTFSGLSLSTSGKGVGWIRQPPGKALEWLAHIWWDDDKRYNPALKSRLTITKDTSKNQVVLTMTNMDPVDTATYYCARIELGRSYVMDYWGQGTLVTVSSASTKGPSVFPLAPSSKSTSGGTAALGCLVKDYFPEPVTVSWNSGALTSGVHTFPAVLQSSGLYSLSSVVTVPSSSLGTQTYICNVNHKPSNTKVDKKVEPKSCDKTHTCPPCPAPELLGGPSVFLFPPKPKDTLMISRTPEVTCVVVDVSHEDPEVKFNWYVDGVEVHNAKTKPREEQYNSTYRVVSVLTVLHQDWLNGKEYKCKVSNKALPAPIEKTISKAKGQPREPQVYTLPPSRDELTKNQVSLTCLVKGFYPSDIAVEWESNGQPENNYKTTPPVLDSDGSFFLYSKLTVDKSRWQQGNVFSCSVMHEALHNHYTQKSLSLSPGK

SEQ ID NO: 125 - protein, 214 aa, Artificial Sequence
  SEQ ID NO: 125 - Humanized 9G7 best-fit first prototype light chain
DIQMTQSPSSLSASVGDRVTITCQASQDVITSVAWFQQKPGKAPKLLIYSASYRYTGVPSRFSGSGSGTDFTFTISSLQPEDIATYYCQQHYTIPLTFGQGTKLEIKRTVAAPSVFIFPPSDEQLKSGTASVVCLLNNFYPREAKVQWKVDNALQSGNSQESVTEQDSKDSTYSLSSTLTLSKADYEKHKVYACEVTHQGLSSPVTKSFNRGEC

SEQ ID NO: 126 - protein, 451 aa, Artificial Sequence
  SEQ ID NO: 126 - Chimeric 9G7 heavy chain IgG1
QVTLKESGPGILQPSQTLSLTCSFSGLSLSTSGKGVGWIRQPSGKGLEWLAHIWWDDDKRYNPALKSRLTISKDTSSNQVFLKIASVDTADTATYYCARIELGRSYVMDYWGQGTTVTVSSASTKGPSVFPLAPSSKSTSGGTAALGCLVKDYFPEPVTVSWNSGALTSGVHTFPAVLQSSGLYSLSSVVTVPSSSLGTQTYICNVNHKPSNTKVDKKVEPKSCDKTHTCPPCPAPELLGGPSVFLFPPKPKDTLMISRTPEVTCVVVDVSHEDPEVKFNWYVDGVEVHNAKTKPREEQYNSTYRVVSVLTVLHQDWLNGKEYKCKVSNKALPAPIEKTISKAKGQPREPQVYTLPPSRDELTKNQVSLTCLVKGFYPSDIAVEWESNGQPENNYKTTPPVLDSDGSFFLYSKLTVDKSRWQQGNVFSCSVMHEALHNHYTQKSLSLSPGK

SEQ ID NO: 127 - protein, 214 aa, Artificial Sequence
  SEQ ID NO: 127 - Chimeric 9G7 human kappa light chain
DIVMTQSHKFMSTSVGDRVSISCKASQDVITSVAWFQQKPGQSPKLLIYSASYRYTGVPDRFTGSGSGTDFTFTISSVQAEDLAVYYCQQHYTIPLTFGAGTKLELKRTVAAPSVFIFPPSDEQLKSGTASVVCLLNNFYPREAKVQWKVDNALQSGNSQESVTEQDSKDSTYSLSSTLTLSKADYEKHKVYACEVTHQGLSSPVTKSFNRGEC

SEQ ID NO: 128 - protein, 214 aa, Artificial Sequence
  SEQ ID NO: 128 - Humanized 9G7 best-fit light chain (prototype light chain with F36Y substitution)
DIQMTQSPSSLSASVGDRVTITCQASQDVITSVAWYQQKPGKAPKLLIYSASYRYTGVPSRFSGSGSGTDFTFTISSLQPEDIATYYCQQHYTIPLTFGQGTKLEIKRTVAAPSVFIFPPSDEQLKSGTASVVCLLNNFYPREAKVQWKVDNALQSGNSQESVTEQDSKDSTYSLSSTLTLSKADYEKHKVYACEVTHQGLSSPVTKSFNRGEC

SEQ ID NO: 129 - protein, 121 aa, Artificial Sequence
  SEQ ID NO: 129 - Humanized 9G7 best-fit VH domain
QVTLKESGPTLVKPTQTLTLTCTFSGLSLSTSGKGVGWIRQPPGKALEWLAHIWWDDDKRYNPALKSRLTITKDTSKNQVVLTMTNMDPVDTATYYCARIELGRSYVMDYWGQGTLVTVSS

SEQ ID NO: 130 - protein, 107 aa, Artificial Sequence
  SEQ ID NO: 130 - Humanized 9G7 best-fit VL domain
DIQMTQSPSSLSASVGDRVTITCQASQDVITSVAWFQQKPGKAPKLLIYSASYRYTGVPSRFSGSGSGTDFTFTISSLQPEDIATYYCQQHYTIPLTFGQGTKLEIK

SEQ ID NO: 131 - protein, 451 aa, Artificial Sequence
  SEQ ID NO: 131 - Humanized 9G7 best-framework heavy chain
EVQLVESGGGLVQPGGSLRLSCAFSGLSLSTSGKGVGWIRQAPGKGLEWLAHIWWDDDKRYNPALKSRLTISKDTSKNTVYLQMNSLRAEDTAVYYCARIELGRSYVMDYWGQGTLVTVSSASTKGPSVFPLAPSSKSTSGGTAALGCLVKDYFPEPVTVSWNSGALTSGVHTFPAVLQSSGLYSLSSVVTVPSSSLGTQTYICNVNHKPSNTKVDKKVEPKSCDKTHTCPPCPAPELLGGPSVFLFPPKPKDTLMISRTPEVTCVVVDVSHEDPEVKFNWYVDGVEVHNAKTKPREEQYNSTYRVVSVLTVLHQDWLNGKEYKCKVSNKALPAPIEKTISKAKGQPREPQVYTLPPSRDELTKNQVSLTCLVKGFYPSDIAVEWESNGQPENNYKTTPPVLDSDGSFFLYSKLTVDKSRWQQGNVFSCSVMHEALHNHYTQKSLSLSPGK

SEQ ID NO: 132 - protein, 214 aa, Artificial Sequence
  SEQ ID NO: 132 - Humanized 9G7 best-framework light chain
DIQMTQSPSSLSASVGDRVTITCRASQDVITSVAWFQQKPGKAPKLLIYSASYRYTGVPSRFSGSGSGTDFTLTISSLQPEDFATYYCQQHYTIPLTFGQGTKVEIKRTVAAPSVFIFPPSDEQLKSGTASVVCLLNNFYPREAKVQWKVDNALQSGNSQESVTEQDSKDSTYSLSSTLTLSKADYEKHKVYACEVTHQGLSSPVTKSFNRGEC

SEQ ID NO: 133 - protein, 121 aa, Artificial Sequence
  SEQ ID NO: 133 - Humanized 9G7 best-framework VH domain
EVQLVESGGGLVQPGGSLRLSCAFSGLSLSTSGKGVGWIRQAPGKGLEWLAHIWWDDDKRYNPALKSRLTISKDTSKNTVYLQMNSLRAEDTAVYYCARIELGRSYVMDYWGQGTLVTVSS

SEQ ID NO: 134 - protein, 107 aa, Artificial Sequence
  SEQ ID NO: 134 - Humanized 9G7 best-framework VL domain
DIQMTQSPSSLSASVGDRVTITCRASQDVITSVAWFQQKPGKAPKLLIYSASYRYTGVPSRFSGSGSGTDFTLTISSLQPEDFATYYCQQHYTIPLTFGQGTKVEIK

SEQ ID NO: 135 - protein, 118 aa, Artificial Sequence
  SEQ ID NO: 135 - Human clone 767 VH domain
QVQLVESGGGLVQPGGSLRLSCAASGFTFSSYWMSWVRQAPGKGLEWVANIKQDGSEKYYVDSVKGRFTISRDNAKNSLYLQMNSLRAEDTAVYYCAREGRTGYFDYWGQGTLVTVSS

SEQ ID NO: 136 - protein, 111 aa, Artificial Sequence
  SEQ ID NO: 136 - Human clone 767 VL domain
QSVLTQPPSASGTPGQRVTISCSGSTSNIGTNYVYWYQQLPGTAPKLLIYRNDQRPSGVPDRFSGSKSGTSASLAISGLRSEDEADYYCAAWDDSRSGVYAFGTGTKVTVL

SEQ ID NO: 137 - protein, 448 aa, Artificial Sequence
  SEQ ID NO: 137 - Human 767 heavy chain
QVQLVESGGGLVQPGGSLRLSCAASGFTFSSYWMSWVRQAPGKGLEWVANIKQDGSEKYYVDSVKGRFTISRDNAKNSLYLQMNSLRAEDTAVYYCAREGRTGYFDYWGQGTLVTVSSASTKGPSVFPLAPSSKSTSGGTAALGCLVKDYFPEPVTVSWNSGALTSGVHTFPAVLQSSGLYSLSSVVTVPSSSLGTQTYICNVNHKPSNTKVDKKVEPKSCDKTHTCPPCPAPELLGGPSVFLFPPKPKDTLMISRTPEVTCVVVDVSHEDPEVKFNWYVDGVEVHNAKTKPREEQYNSTYRVVSVLTVLHQDWLNGKEYKCKVSNKALPAPIEKTISKAKGQPREPQVYTLPPSRDELTKNQVSLTCLVKGFYPSDIAVEWESNGQPENNYKTTPPVLDSDGSFFLYSKLTVDKSRWQQGNVFSCSVMHEALHNHYTQKSLSLSPGK

SEQ ID NO: 138 - protein, 218 aa, Artificial Sequence
  SEQ ID NO: 138 - Human 767 light chain
QSVLTQPPSASGTPGQRVTISCSGSTSNIGTNYVYWYQQLPGTAPKLLIYRNDQRPSGVPDRFSGSKSGTSASLAISGLRSEDEADYYCAAWDDSRSGVYAFGTGTKVTVLRTVAAPSVFIFPPSDEQLKSGTASVVCLLNNFYPREAKVQWKVDNALQSGNSQESVTEQDSKDSTYSLSSTLTLSKADYEKHKVYACEVTHQGLSSPVTKSFNRGEC

SEQ ID NO: 139 - protein, 118 aa, Artificial Sequence
  SEQ ID NO: 139 - Mouse anti-human OX40 antibody VH domain from WO2013/008171
QVTLKESGPGILQPSQTLSLTCSFSGFSLSTSGMGVGWIRQPSGKGLEWLAHIWWDDDKYYNTALKSGLTISKDTSKNQVFLKIASVDTTDTATYYCARIDWDGFAYWGQGTLVTVSS

SEQ ID NO: 140 - protein, 106 aa, Artificial Sequence
  SEQ ID NO: 140 - Mouse anti-human OX40 antibody VL domain from WO2013/008171
QIVLTQSPAILSASPGEKVTMTCRASSSVSYMHWYQQKPGSSPKPWIYATSNLASGVPARFSGSGSGTSYSLTINRVEAEDAATYYCQQWSSNPWTFGGGTKLEIK

SEQ ID NO: 141 - protein, 118 aa, Artificial Sequence
  SEQ ID NO: 141 - Humanized anti-human OX40 antibody VH domain from WO2013/008171
QVTLKESGPALVKPTQTLTLTCSFSGFSLSTSGMGVGWIRQPPGKALEWIAHIWWDDDKYYNTALKTRLTISKDTSKNQVVLTMTNMDPVDTATYYCARIDWDGFAYWGQGTLVTVSS

SEQ ID NO: 142 - protein, 106 aa, Artificial Sequence
  SEQ ID NO: 142 - Humanized anti-human OX40 antibody VL domain from WO2013/008171
EIVLTQSPATLSLSPGERATLSCRASSSVSYMHWYQQKPGQAPRPWIYATSNRATGIPARFSGSGSGTDYTLTISSLEPEDFAVYYCQQWSSNPWTFGQGTKVEIK

SEQ ID NO: 143 - protein, 121 aa, Artificial Sequence [sequence omitted]

SEQ ID NO: 144 - protein, 108 aa, Artificial Sequence
  SEQ ID NO: 144 - rituximab mouse VL domain
QIVLSQSPAILSASPGEKVTMETTCRASSSVSYIHWFQQKPGSSPKPWIYATSNLASGVPVRFSGSGSGTSYSLTISRVEAEDAATYYCQQWTSNPPTFGGGTKLEIK

SEQ ID NO: 145 - protein, 119 aa, Artificial Sequence
  SEQ ID NO: 145 - cetuximab mouse VH domain
QVQLKQSGPGLVQPSQSLSITCTVSGFSLTNYGVHWVRQSPGKGLEWLGVIWSGGNTDYNTPFTSRLSINKDNSKSQVFFKMNSLQSNDTAIYYCARALTYYDYEFAYWGQGTLVTVSA

SEQ ID NO: 146 - protein, 107 aa, Artificial Sequence
  SEQ ID NO: 146 - cetuximab mouse VL domain
DILLTQSPVILSVSPGERVSFSCRASQSIGTNIHWYQQRTNGSPRLLIKYASESISGIPSRFSGSGSGTDFTLSINSVESEDIADYYCQQNNNWPTTFGAGTKLELK

SEQ ID NO: 147 - protein, 107 aa, Artificial Sequence
  SEQ ID NO: 147 - BTA CH3 NO: 1 Original BTA  11
GQPREPQVYTLPPSRDELTKNQVKLVCLVTGFYPSDIAVEWESNGQPENNYYTTPPVLDSDGSFSLVSWLNVDKSRWQQGNVFSCSVMHEALHNHYTQKSLSLSPGK

SEQ ID NO: 148 - protein, 107 aa, Artificial Sequence
  SEQ ID NO: 148 - BTA CH3 NO: 2 BTA FTO 11
GQPREPAVYTLPPSRDELTKNQVKLVCLVTGFYPSDIAVEWESNGQPENNYYTTPPVLDSDGSFSLVSWLNVDKSRWQQGNVFSCSVMHEALHNHYTQKSLSLSPGK

SEQ ID NO: 149 - protein, 107 aa, Artificial Sequence
  SEQ ID NO: 149 - BTA CH3 NO: 3 BTA FTO 33 411D
GQPREPAVYTLPPSREEMTKNQVKLVCLVTGFYPSDIAVEWESSGQPENNYYTTPPMLDSDGSFSLVSWLDVDKSRWQQGNIFSCSVMHEALHNRFTQKSLSLSPGK

SEQ ID NO: 150 - protein, 107 aa, Artificial Sequence
  SEQ ID NO: 150 - BTB CH3 NO: 1 Original BTB
GQPREPEVATFPPSRDELTKNQVTLVCLVTGFYPSDIAVEWESNGQPENNYKTDPPLLESDGSFALSSRLRVDKSRWQQGNVFSCSVMHEALHNHYTQKSLSLSPGK

SEQ ID NO: 151 - protein, 107 aa, Artificial Sequence
  SEQ ID NO: 151 - BTB CH3 NO: 2 BTB 401R 11
GQPREPEVATFPPSRDELTKNQVTLVCLVTGFYPSDIAVEWESNGQPENNYKTDPPLLESRGSFALSSRLRVDKSRWQQGNVFSCSVMHEALHNHYTQKSLSLSPGK

SEQ ID NO: 152 - protein, 107 aa, Artificial Sequence
  SEQ ID NO: 152 - BTB CH3 No: 3 BTB 401Q 11
GQPREPEVATFPPSRDELTKNQVTLVCLVTGFYPSDIAVEWESNGQPENNYKTDPPLLESQGSFALSSRLRVDKSRWQQGNVFSCSVMHEALHNHYTQKSLSLSPGK

SEQ ID NO: 153 - protein, 107 aa, Artificial Sequence
  SEQ ID NO: 153 - BTA CH3 NO: 4 BTA 11_FTO_N411T
GQPREPAVYTLPPSRDELTKNQVKLVCLVTGFYPSDIAVEWESNGQPENNYYTTPPVLDSDGSFSLVSWLTVDKSRWQQGNVFSCSVMHEALHNHYTQKSLSLSPGK

SEQ ID NO: 154 - protein, 107 aa, Artificial Sequence
  SEQ ID NO: 154 - BTA CH3 NO: 5 BTA 33_FTO
GQPREPAVYTLPPSREEMTKNQVKLVCLVTGFYPSDIAVEWESSGQPENNYYTTPPMLDSDGSFSLVSWLNVDKSRWQQGNIFSCSVMHEALHNRFTQKSLSLSPGK

SEQ ID NO: 155 - protein, 107 aa, Artificial Sequence
  SEQ ID NO: 155 - BTA CH3 NO: 6 BTA 33_FTO_N411T
GQPREPAVYTLPPSREEMTKNQVKLVCLVTGFYPSDIAVEWESSGQPENNYYTTPPMLDSDGSFSLVSWLTVDKSRWQQGNIFSCSVMHEALHNRFTQKSLSLSPGK

SEQ ID NO: 156 - protein, 107 aa, Artificial Sequence
  SEQ ID NO: 156 - BTB CH3 No: 4 BTB 33_D401Q
GQPREPEVATFPPSREEMTKNQVTLVCLVTGFYPSDIAVEWESSGQPENNYNTDPPLLESQGSFALSSRLRVDKSRWQQGNIFSCSVMHEALHNRFTQKSLSLSPGK

SEQ ID NO: 157 - protein, 107 aa, Artificial Sequence
  SEQ ID NO: 157 - BTB CH3 No: 5 BTB 11_D401Q_R411T
GQPREPEVATFPPSRDELTKNQVTLVCLVTGFYPSDIAVEWESNGQPENNYKTDPPLLESQGSFALSSRLTVDKSRWQQGNVFSCSVMHEALHNHYTQKSLSLSPGK

SEQ ID NO: 158 - protein, 107 aa, Artificial Sequence
  SEQ ID NO: 158 - BTB CH3 No: 6 BTB 33_D401Q_R411T
GQPREPEVATFPPSREEMTKNQVTLVCLVTGFYPSDIAVEWESSGQPENNYNTDPPLLESQGSFALSSRLTVDKSRWQQGNIFSCSVMHEALHNRFTQKSLSLSPGK

SEQ ID NO: 159 - protein, 449 aa, Artificial Sequence
  SEQ ID NO: 159 - BEAT HER2/CD3-1 antibody FAB heavy chain (CD3 epsilon arm - humanized OKT3 with N82aS substitution)
EVQLVESGGGLVQPGGSLRLSCAASGYTFTRYTMHWVRQAPGKGLEWIGYINPSRGYTYYADSVKGRFTLSTDKSKNTAYLQMSSLRAEDTAVYYCARYYDDHYCLDYWGQGTLVTVSSASTKGPSVFPLAPSSKSTSGGTAALGCLVKDYFPEPVTVSWNSGALTSGVHTFPAVLQSSGLYSLSSVVTVPSSSLGTQTYICNVNHKPSNTKVDKKVEPKSCDKTHTCPPCPAPEAAGGPSVFLFPPKPKDTLMISRTPEVTCVVVDVSHEDPEVQFKWYVDGVEVHNAKTKPREEQYNSTFRVVSVLTVLHQDWLNGKEYKCKVSNKALPAPIEKTISKTKGQPREPAVYTLPPSREEMTKNQVKLVCLVTGFYPSDIAVEWESSGQPENNYYTTPPMLDSDGSFSLVSWLNVDKSRWQQGNIFSCSVMHEALHNRFTQKSLSLSPGK

SEQ ID NO: 160 - protein, 475 aa, Artificial Sequence
  SEQ ID NO: 160 - BEAT HER2/CD3-1 antibody scFv heavy chain (HER2 arm)
EVQLVESGGGLVQPGGSLRLSCAASGFNIKDTYIHWVRQAPGKGLEWVARIYPTNGYTRYADSVKGRFTISADTSKNTAYLQMNSLRAEDTAVYYCSRWGGDGFYAMDYWGQGTLVTVSSGGGGSGGGGSGGGGSDIQMTQSPSSLSASVGDRVTITCRASQDVNTAVAWYQQKPGKAPKLLIYSASFLYSGVPSRFSGSRSGTDFTLTISSLQPEDFATYYCQQHYTTPPTFGQGTKVEIKRGGGGTDKTHTCPPCPAPEAAGGPSVFLFPPKPKDTLMISRTPEVTCVVVDVSHEDPEVKFNWYVDGVEVHNAKTKPREEQYNSTYRVVSVLTVLHQDWLNGKEYKCKVSNKALPAPIEKTISKAKGQPREPEVATFPPSRDELTKNQVTLVCLVTGFYPSDIAVEWESNGQPENNYKTDPPLLESDGSFALSSRLRVDKSRWQQGNVFSCSVMHEALHNHYTQKSLSLSPGK

SEQ ID NO: 161 - protein, 450 aa, Artificial Sequence
  SEQ ID NO: 161 - BEAT HER2/CD3-2 antibody FAB heavy chain (HER2 arm)
EVQLVESGGGLVQPGGSLRLSCAASGFNIKDTYIHWVRQAPGKGLEWVARIYPTNGYTRYADSVKGRFTISADTSKNTAYLQMNSLRAEDTAVYYCSRWGGDGFYAMDYWGQGTLVTVSSASTNGPSVFPLAPSSKSTSGGTAALGCLVKDYFPEPVTVSWNSGALTSGVHTFPAVLQSSGLYSLSSVVTVPSSSLGTQTYICNVNHKPSNTKVDKKVEPKSCDKTHTCPPCPAPEAAGGPSVFLFPPKPKDTLMISRTPEVTCVVVDVSHEDPEVKFNWYVDGVEVHNAKTKPREEQYNSTYRVVSVLTVLHQDWLNGKEYKCKVSNKALPAPIEKTISKAKGQPREPAVYTLPPSRDELTKNQVKLVCLVTGFYPSDIAVEWESNGQPENNYYTTPPVLDSDGSFSLVSWLNVDKSRWQQGNVFSCSVMHEALHNHYTQKSLSLSPGK

SEQ ID NO: 162 - protein, 477 aa, Artificial Sequence
  SEQ ID NO: 162 - BEAT HER2/CD3-2 antibody scFv heavy chain (CD3 epsilon arm - humanized OKT3 with N82aS substitution)
EVQLVESGGGLVQPGGSLRLSCAASGYTFTRYTMHWVRQAPGKGLEWIGYINPSRGYTYYADSVKGRFTLSTDKSKNTAYLQMSSLRAEDTAVYYCARYYDDHYCLDYWGQGTLVTVSSGGGGSGGGGSGGGGSGGGASDIQLTQSPSSLSASVGDRVTITCRASSSVSYVAWYQQKPGKAPKRWIYDTSKLYSGVPSRFSGSGSGTDYTLTISSLQPEDFATYYCQQWSSNPPTFGQGTKVEIKGGGGTDKTHTCPPCPAPEAAGGPSVFLFPPKPKDTLMISRTPEVTCVVVDVSHEDPEVQFKWYVDGVEVHNAKTKPREEQYNSTFRVVSVLTVLHQDWLNGKEYKCKVSNKALPAPIEKTISKTKGQPREPEVATFPPSREEMTKNQVTLVCLVTGFYPSDIAVEWESSGQPENNYNTDPPLLESDGSFALSSRLRVDKSRWQQGNIFSCSVMHEALHNRFTQKSLSLSPGK

SEQ ID NO: 163 - protein, 449 aa, Artificial Sequence
  SEQ ID NO: 163 - BEAT HER2/CD3-3 antibody FAB heavy chain(CD3 epsilon arm - humanized OKT3 with G65S substitution)
EVQLVESGGGLVQPGGSLRLSCAASGYTFTRYTMHWVRQAPGKGLEWIGYINPSRGYTYYADSVKSRFTLSTDKSKNTAYLQMNSLRAEDTAVYYCARYYDDHYCLDYWGQGTLVTVSSASTKGPSVFPLAPSSKSTSGGTAALGCLVKDYFPEPVTVSWNSGALTSGVHTFPAVLQSSGLYSLSSVVTVPSSSLGTQTYICNVNHKPSNTKVDKKVEPKSCDKTHTCPPCPAPEAAGGPSVFLFPPKPKDTLMISRTPEVTCVVVDVSHEDPEVQFKWYVDGVEVHNAKTKPREEQYNSTFRVVSVLTVLHQDWLNGKEYKCKVSNKALPAPIEKTISKTKGQPREPAVYTLPPSREEMTKNQVKLVCLVTGFYPSDIAVEWESSGQPENNYYTTPPMLDSDGSFSLVSWLNVDKSRWQQGNIFSCSVMHEALHNRFTQKSLSLSPGK

SEQ ID NO: 164 - protein, 474 aa, Artificial Sequence
  SEQ ID NO: 164 - BEAT HER2/CD3-3 antibody scFv heavy chain (HER2 arm with additional disulfide bond)
EVQLVESGGGLVQPGGSLRLSCAASGFNIKDTYIHWVRQAPGKCLEWVARIYPTNGYTRYADSVKGRFTISADTSKNTAYLQMNSLRAEDTAVYYCSRWGGDGFYAMDYWGQGTLVTVSSGGGGSGGGGSGGGGSDIQMTQSPSSLSASVGDRVTITCRASQDVNTAVAWYQQKPGKAPKLLIYSASFLYSGVPSRFSGSRSGTDFTLTISSLQPEDFATYYCQQHYTTPPTFGCGTKVEIKGGGGTDKTHTCPPCPAPEAAGGPSVFLFPPKPKDTLMISRTPEVTCVVVDVSHEDPEVKFNWYVDGVEVHNAKTKPREEQYNSTYRVVSVLTVLHQDWLNGKEYKCKVSNKALPAPIEKTISKAKGQPREPEVATFPPSRDELTKNQVTLVCLVTGFYPSDIAVEWESNGQPENNYKTDPPLLESQGSFALSSRLRVDKSRWQQGNVFSCSVMHEALHNHYTQKSLSLSPGK

SEQ ID NO: 165 - protein, 455 aa, Artificial Sequence
  SEQ ID NO: 165 - BEAT HER2/CD3(SP34) antibody FAB heavy chain(CD3 epsilon arm - humanized SP34 VH from WO2008/119565)
EVQLVESGGGLVQPGGSLKLSCAASGFTFNKYAMNWVRQAPGKGLEWVARIRSKYNNYATYYADSVKDRFTISRDDSKNTAYLQMNNLKTEDTAVYYCVRHGNFGNSYISYWAYWGQGTLVTVSSASTKGPSVFPLAPSSKSTSGGTAALGCLVKDYFPEPVTVSWNSGALTSGVHTFPAVLQSSGLYSLSSVVTVPSSSLGTQTYICNVNHKPSNTKVDKKVEPKSCDKTHTCPPCPAPEAAGGPSVFLFPPKPKDTLMISRTPEVTCVVVDVSHEDPEVKFNWYVDGVEVHNAKTKPREEQYNSTYRVVSVLTVLHQDWLNGKEYKCKVSNKALPAPIEKTISKAKGQPREPAVYTLPPSRDELTKNQVKLVCLVTGFYPSDIAVEWESNGQPENNYYTTPPVLDSDGSFSLVSWLNVDKSRWQQGNVFSCSVMHEALHNHYTQKSLSLSPGK

SEQ ID NO: 166 - protein, 217 aa, Artificial Sequence
  SEQ ID NO: 166 - BEAT HER2/CD3(SP34) antibody FAB light chain(CD3 epsilon arm - humanized SP34 VL from WO2008/119565)
QTVVTQEPSLTVSPGGTVTLTCGSSTGAVTSGNYPNWVQQKPGQAPRGLIGGTKFLAPGTPARFSGSLLGGKAALTLSGVQPEDEAEYYCVLWYSNRWVFGGGTKLTVLGRTVAAPSVFIFPPSDEQLKSGTASVVCLLNNFYPREAKVQWKVDNALQSGNSQESVTEQDSKDSTYSLSSTLTLSKADYEKHKVYACEVTHQGLSSPVTKSFNRGEC

SEQ ID NO: 167 - protein, 474 aa, Artificial Sequence
  SEQ ID NO: 167 - BEAT HER2/CD3(SP34) antibody scFv heavy chain (HER2 arm with N82aS substitution)
EVQLVESGGGLVQPGGSLRLSCAASGFNIKDTYIHWVRQAPGKGLEWVARIYPTNGYTRYADSVKGRFTISADTSKNTAYLQMSSLRAEDTAVYYCSRWGGDGFYAMDYWGQGTLVTVSSGGGGSGGGGSGGGGSDIQMTQSPSSLSASVGDRVTITCRASQDVNTAVAWYQQKPGKAPKLLIYSASFLYSGVPSRFSGSRSGTDFTLTISSLQPEDFATYYCQQHYTTPPTFGQGTKVEIKGGGGTDKTHTCPPCPAPEAAGGPSVFLFPPKPKDTLMISRTPEVTCVVVDVSHEDPEVQFKWYVDGVEVHNAKTKPREEQYNSTFRVVSVLTVLHQDWLNGKEYKCKVSNKALPAPIEKTISKTKGQPREPEVATFPPSREEMTKNQVTLVCLVTGFYPSDIAVEWESSGQPENNYNTDPPLLESQGSFALSSRLRVDKSRWQQGNIFSCSVMHEALHNRFTQKSLSLSPGK

SEQ ID NO: 168 - protein, 455 aa, Artificial Sequence
  SEQ ID NO: 168 - BEAT HER2/CD3(SP34-Kappa1) antibody FAB heavy chain(CD3 epsilon arm - humanized SP34 VH1)
EVQLVESGGGLVQPGGSLRLSCAASGFTFNTYAMNWVRQAPGKGLEWVARIRSKYNNYATYYADSVKGRFTISRDDSKNTLYLQMNSLRAEDTAVYYCVRHGNFGNSYVSWFAYWGQGTTVTVSSASTKGPSVFPLAPSSKSTSGGTAALGCLVKDYFPEPVTVSWNSGALTSGVHTFPAVLQSSGLYSLSSVVTVPSSSLGTQTYICNVNHKPSNTKVDKKVEPKSCDKTHTCPPCPAPEAAGGPSVFLFPPKPKDTLMISRTPEVTCVVVDVSHEDPEVKFNWYVDGVEVHNAKTKPREEQYNSTYRVVSVLTVLHQDWLNGKEYKCKVSNKALPAPIEKTISKAKGQPREPAVYTLPPSRDELTKNQVKLVCLVTGFYPSDIAVEWESNGQPENNYYTTPPVLDSDGSFSLVSWLNVDKSRWQQGNVFSCSVMHEALHNHYTQKSLSLSPGK

SEQ ID NO: 169 - protein, 449 aa, Artificial Sequence
  SEQ ID NO: 169 - BEAT CD38-HB7bestfit/CD3 antibody FAB heavy chain (CD38 arm - humanized HB-7 best-fit)
QVQLQESGPGLVKPSETLSLTCTVSGFSLISYGVHWVRQPPGKGLEWLGVIWRGGSTDYNAAFMSRLTISKDNSKNQVSLKLSSVTAADTAVYFCAKTLITTGYAMDYWGQGTLVTVSSASTKGPSVFPLAPSSKSTSGGTAALGCLVKDYFPEPVTVSWNSGALTSGVHTFPAVLQSSGLYSLSSVVTVPSSSLGTQTYICNVNHKPSNTKVDKKVEPKSCDKTHTCPPCPAPEAAGGPSVFLFPPKPKDTLMISRTPEVTCVVVDVSHEDPEVKFNWYVDGVEVHNAKTKPREEQYNSTYRVVSVLTVLHQDWLNGKEYKCKVSNKALPAPIEKTISKAKGQPREPAVYTLPPSRDELTKNQVKLVCLVTGFYPSDIAVEWESNGQPENNYYTTPPVLDSDGSFSLVSWLNVDKSRWQQGNVFSCSVMHEALHNHYTQKSLSLSPGK

SEQ ID NO: 170 - protein, 449 aa, Artificial Sequence
  SEQ ID NO: 170 - BEAT CD38-767/CD3 antibody FAB heavy chain (CD38 arm - human clone 767)
QVQLQESGPGLVKPSETLSLTCTVSGFSLISYGVHWVRQPPGKGLEWLGVIWRGGSTDYNAAFMSRLTISKDNSKNQVSLKLSSVTAADTAVYFCAKTLITTGYAMDYWGQGTLVTVSSASTKGPSVFPLAPSSKSTSGGTAALGCLVKDYFPEPVTVSWNSGALTSGVHTFPAVLQSSGLYSLSSVVTVPSSSLGTQTYICNVNHKPSNTKVDKKVEPKSCDKTHTCPPCPAPEAAGGPSVFLFPPKPKDTLMISRTPEVTCVVVDVSHEDPEVQFKWYVDGVEVHNAKTKPREEQYNSTFRVVSVLTVLHQDWLNGKEYKCKVSNKALPAPIEKTISKTKGQPREPAVYTLPPSREEMTKNQVKLVCLVTGFYPSDIAVEWESSGQPENNYYTTPPMLDSDGSFSLVSWLNVDKSRWQQGNIFSCSVMHEALHNRFTQKSLSLSPGK

SEQ ID NO: 171 - protein, 482 aa, Artificial Sequence
  SEQ ID NO: 171 - BEAT CD38-767/CD3 antibody scFv heavy chain(CD3 epsilon arm - humanized OKT3 with G65S substitution)
EVQLVESGGGLVQPGGSLKLSCAASGFTFNKYAMNWVRQAPGKGLEWVARIRSKYNNYATYYADSVKDRFTISRDDSKNTAYLQMNNLKTEDTAVYYCVRHGNFGNSYISYWAYWGQGTLVTVSSGGGGSGGGGSGGGGSQTVVTQEPSLTVSPGGTVTLTCGSSTGAVTSGNYPNWVQQKPGQAPRGLIGGTKFLAPGTPARFSGSLLGGKAALTLSGVQPEDEAEYYCVLWYSNRWVFGGGTKLTVLGGGGGTDKTHTCPPCPAPEAAGGPSVFLFPPKPKDTLMISRTPEVTCVVVDVSHEDPEVKFNWYVDGVEVHNAKTKPREEQYNSTYRVVSVLTVLHQDWLNGKEYKCKVSNKALPAPIEKTISKAKGQPREPEVATFPPSRDELTKNQVTLVCLVTGFYPSDIAVEWESNGQPENNYKTDPPLLESQGSFALSSRLRVDKSRWQQGNVFSCSVMHEALHNHYTQKSLSLSPGK

SEQ ID NO: 172 - protein, 448 aa, Artificial Sequence
  SEQ ID NO: 172 - BEAT OX40/CD3 antibody FAB heavy chain (OX40 arm with humanized anti-human OX40 VH domain from WO2013/008171)
QVTLKESGPALVKPTQTLTLTCSFSGFSLSTSGMGVGWIRQPPGKALEWIAHIWWDDDKYYNTALKTRLTISKDTSKNQVVLTMTNMDPVDTATYYCARIDWDGFAYWGQGTLVTVSSASTKGPSVFPLAPSSKSTSGGTAALGCLVKDYFPEPVTVSWNSGALTSGVHTFPAVLQSSGLYSLSSVVTVPSSSLGTQTYICNVNHKPSNTKVDKKVEPKSCDKTHTCPPCPAPEAAGGPSVFLFPPKPKDTLMISRTPEVTCVVVDVSHEDPEVKFNWYVDGVEVHNAKTKPREEQYNSTYRVVSVLTVLHQDWLNGKEYKCKVSNKALPAPIEKTISKAKGQPREPAVYTLPPSRDELTKNQVKLVCLVTGFYPSDIAVEWESNGQPENNYYTTPPVLDSDGSFSLVSWLNVDKSRWQQGNVFSCSVMHEALHNHYTQKSLSLSPGK

SEQ ID NO: 173 - protein, 213 aa, Artificial Sequence
  SEQ ID NO: 173 - BEAT OX40/CD3 antibody FAB light chain (OX40 arm with humanized anti-human OX40 VL domain from WO2013/008171)
EIVLTQSPATLSLSPGERATLSCRASSSVSYMHWYQQKPGQAPRPWIYATSNRATGIPARFSGSGSGTDYTLTISSLEPEDFAVYYCQQWSSNPWTFGQGTKVEIKRTVAAPSVFIFPPSDEQLKSGTASVVCLLNNFYPREAKVQWKVDNALQSGNSQESVTEQDSKDSTYSLSSTLTLSKADYEKHKVYACEVTHQGLSSPVTKSFNRGEC

SEQ ID NO: 174 - protein, 449 aa, Artificial Sequence
  SEQ ID NO: 174 - BEAT EGFR/CD3 antibody FAB heavy chain (EGFR arm with mouse Erbitux VH domain)
QVQLKQSGPGLVQPSQSLSITCTVSGFSLTNYGVHWVRQSPGKGLEWLGVIWSGGNTDYNTPFTSRLSINKDNSKSQVFFKMNSLQSNDTAIYYCARALTYYDYEFAYWGQGTLVTVSAASTKGPSVFPLAPSSKSTSGGTAALGCLVKDYFPEPVTVSWNSGALTSGVHTFPAVLQSSGLYSLSSVVTVPSSSLGTQTYICNVNHKPSNTKVDKKVEPKSCDKTHTCPPCPAPEAAGGPSVFLFPPKPKDTLMISRTPEVTCVVVDVSHEDPEVKFNWYVDGVEVHNAKTKPREEQYNSTYRVVSVLTVLHQDWLNGKEYKCKVSNKALPAPIEKTISKAKGQPREPAVYTLPPSRDELTKNQVKLVCLVTGFYPSDIAVEWESNGQPENNYYTTPPVLDSDGSFSLVSWLNVDKSRWQQGNVFSCSVMHEALHNHYTQKSLSLSPGK

SEQ ID NO: 175 - protein, 214 aa, Artificial Sequence
  SEQ ID NO: 175 - BEAT EGFR/CD3 antibody FAB light chain (EGFR arm with mouse Erbitux VL domain)
DILLTQSPVILSVSPGERVSFSCRASQSIGTNIHWYQQRTNGSPRLLIKYASESISGIPSRFSGSGSGTDFTLSINSVESEDIADYYCQQNNNWPTTFGAGTKLELKRTVAAPSVFIFPPSDEQLKSGTASVVCLLNNFYPREAKVQWKVDNALQSGNSQESVTEQDSKDSTYSLSSTLTLSKADYEKHKVYACEVTHQGLSSPVTKSFNRGEC

SEQ ID NO: 176 - protein, 449 aa, Artificial Sequence; identical to SEQ ID NO: 170
  SEQ ID NO: 176 - BEAT CD38-HB7bestfit/CD3(SP34)antibody FAB heavy chain (CD38 arm - humanized HB-7 best-fit)

SEQ ID NO: 177 - protein, 482 aa, Artificial Sequence; identical to SEQ ID NO: 171
  SEQ ID NO: 177 - BEST CD38-HB7bestfit/CD3(SP34) antibody scFv heavy chain (CD3 arm - humanized SP34 VH/VL domains from WO2008/119565)

SEQ ID NO: 178 - protein, 451 aa, Artificial Sequence
  SEQ ID NO: 178 - BEAT CD38-9G7bestfit/CD3(SP34)antibody FAB heavy chain (CD38 arm - humanized 9G7 best-fit VH)
QVTLKESGPTLVKPTQTLTLTCTFSGLSLSTSGKGVGWIRQPPGKALEWLAHIWWDDDKRYNPALKSRLTITKDTSKNQVVLTMTNMDPVDTATYYCARIELGRSYVMDYWGQGTLVTVSSASTKGPSVFPLAPSSKSTSGGTAALGCLVKDYFPEPVTVSWNSGALTSGVHTFPAVLQSSGLYSLSSVVTVPSSSLGTQTYICNVNHKPSNTKVDKKVEPKSCDKTHTCPPCPAPEAAGGPSVFLFPPKPKDTLMISRTPEVTCVVVDVSHEDPEVQFKWYVDGVEVHNAKTKPREEQYNSTFRVVSVLTVLHQDWLNGKEYKCKVSNKALPAPIEKTISKTKGQPREPAVYTLPPSREEMTKNQVKLVCLVTGFYPSDIAVEWESSGQPENNYYTTPPMLDSDGSFSLVSWLNVDKSRWQQGNIFSCSVMHEALHNRFTQKSLSLSPGK

SEQ ID NO: 179 - protein, 482 aa, Artificial Sequence
  SEQ ID NO: 179 - BEAT CD38-9G7bestfit/CD3(SP34-Kappa2) antibody scFv heavy chain (CD3 arm - humanized SP34 VH5/VL32)v
  misc_feature (213)..(213): Xaa can be any naturally occurring amino acid
EVQLVESGGGLVQPGGSLRLSCAASGFTFNTYAMNWVRQAPGKGLEWVARIRSKYNNYATYYADSVKGRFTISRDDSKNTLYLQMNSLRAEDTAVYYCVRHGNFGNSYVSWFAYWGQGTTVTVSSGGGGSGGGGSGGGGSEIVVTQSPATLSVSPGERATLSCRSSTGAVTTSNYANWVQEKPGQAFRGLIGGANKRAPGVPARFSGSLSGDXATLTISSLQSEDFAVYYCALWYSNLWVFGQGTKLEIKGGGGTDKTHTCPPCPAPEAAGGPSVFLFPPKPKDTLMISRTPEVTCVVVDVSHEDPEVKFNWYVDGVEVHNAKTKPREEQYNSTYRVVSVLTVLHQDWLNGKEYKCKVSNKALPAPIEKTISKAKGQPREPEVATFPPSRDELTKNQVTLVCLVTGFYPSDIAVEWESNGQPENNYKTDPPLLESQGSFALSSRLRVDKSRWQQGNVFSCSVMHEALHNHYTQKSLSLSPGK

SEQ ID NO: 180 - protein, 451 aa, Artificial Sequence
  SEQ ID NO: 180 - BEAT CD20/CD3 antibody FAB heavy chain
QVQLQQPGAELVKPGASVKMSCKASGYTFTSYNMHWVKQTPGRGLEWIGAIYPGNGDTSYNQKFKGKATLTADKSSSTAYMQLSSLTSEDSAVYYCARSTYYGGDWYFNVWGAGTTVTVSAASTKGPSVFPLAPSSKSTSGGTAALGCLVKDYFPEPVTVSWNSGALTSGVHTFPAVLQSSGLYSLSSVVTVPSSSLGTQTYICNVNHKPSNTKVDKKVEPKSCDKTHTCPPCPAPEAAGGPSVFLFPPKPKDTLMISRTPEVTCVVVDVSHEDPEVQFKWYVDGVEVHNAKTKPREEQYNSTFRVVSVLTVLHQDWLNGKEYKCKVSNKALPAPIEKTISKTKGQPREPAVYTLPPSREEMTKNQVKLVCLVTGFYPSDIAVEWESSGQPENNYYTTPPMLDSDGSFSLVSWLNVDKSRWQQGNIFSCSVMHEALHNRFTQKSLSLSPGK

SEQ ID NO: 181 - protein, 215 aa, Artificial Sequence
  SEQ ID NO: 181 - BEAT CD20/CD3 antibody FAB light chain
QIVLSQSPAILSASPGEKVTMETTCRASSSVSYIHWFQQKPGSSPKPWIYATSNLASGVPVRFSGSGSGTSYSLTISRVEAEDAATYYCQQWTSNPPTFGGGTKLEIKRTVAAPSVFIFPPSDEQLKSGTASVVCLLNNFYPREAKVQWKVDNALQSGNSQESVTEQDSKDSTYSLSSTLTLSKADYEKHKVYACEVTHQGLSSPVTKSFNRGEC

SEQ ID NO: 182 - protein, 121 aa, Artificial Sequence [sequence omitted]

SEQ ID NO: 183 - protein, 121 aa, Artificial Sequence [sequence omitted]

SEQ ID NO: 184 - protein, 94 aa, Artificial Sequence
  SEQ ID NO: 184 - Human CD3 gamma extracellular region
QSIKGNHLVKVYDYQEDGSVLLTCDAEAKNITWFKDGKMIGFLTEDKKKWNLGSNAKDPRGMYQCKGSQNKSKPLQVYYRMCQNCIELNAATIS

SEQ ID NO: 185 - protein, 104 aa, Artificial Sequence
  SEQ ID NO: 185 - Human CD3 epsilon extracellular region
DGNEEMGGITQTPYKVSISGTTVILTCPQYPGSEILWQHNDKNIGGDEDDKNIGSDEDHLSLKEFSELEQSGYYVCYPRGSKPEDANFYLYLRARVCENCMEMD

SEQ ID NO: 186 - protein, 26 aa, Artificial Sequence
  SEQ ID NO: 186 - 26-residue peptide linker
GSADDAKKDAAKKDDAKKDDAKKDGS

SEQ ID NO: 187 - protein, 435 aa, Artificial Sequence
  SEQ ID NO: 187 - Human CD3 gamma-epsilon-Fc fusion protein
QSIKGNHLVKVYDYQEDGSVLLTCDAEAKNITWFKDGKMIGFLTEDKKKWNLGSNAKDPRGMYQCKGSQNKSKPLQVYYRMGSADDAKKDAAKKDDAKKDDAKKDGSQDGNEEMGGITQTPYKVSISGTTVILTCPQYPGSEILWQHNDKNIGGDEDDKNIGSDEDHLSLKEFSELEQSGYYVCYPRGSKPEDANFYLYLRARVGGGGTDKTHTCPPCPAPELLGGPSVFLFPPKPKDTLMISRTPEVTCVVVDVSHEDPEVKFNWYVDGVEVHNAKTKPREEQYNSTYRVVSVLTVLHQDWLNGKEYKCKVSNKALPAPIEKTISKAKGQPREPQVYTLPPSRDELTKNQVSLTCLVKGFYPSDIAVEWESNGQPENNYKTTPPVLDSDGSFFLYSKLTVDKSRWQQGNVFSCSVMHEALHNHYTQKSLSLSPG

SEQ ID NO: 188 - protein, 26 aa, Artificial Sequence
  SEQ ID NO: 188 - Human CD3 epsilon 1-26 amino acid sequence
QDGNEEMGGITQTPYKVSISGTTVIL

SEQ ID NO: 189 - protein, 26 aa, Artificial Sequence
  SEQ ID NO: 189 - Cynomolgus monkey CD3 epsilon 1-26 amino acid sequence
QDGNEEMGSITQTPYQVSISGTTVIL

SEQ ID NO: 190 - protein, 258 aa, Artificial Sequence
  SEQ ID NO: 190 - Human CD3 epsilon 1-26 Fc fusion
QDGNEEMGGITQTPYKVSISGTTVILGGGGTDKTHTCPPCPAPELLGGPSVFLFPPKPKDTLMISRTPEVTCVVVDVSHEDPEVKFNWYVDGVEVHNAKTKPREEQYNSTYRVVSVLTVLHQDWLNGKEYKCKVSNKALPAPIEKTISKAKGQPREPQVYTLPPSRDELTKNQVSLTCLVKGFYPSDIAVEWESNGQPENNYKTTPPVLDSDGSFFLYSKLTVDKSRWQQGNVFSCSVMHEALHNHYTQKSLSLSPGK

SEQ ID NO: 191 - protein, 258 aa, Artificial Sequence
  SEQ ID NO: 191 - Cynomolgus monkey CD3 epsilon 1-26 Fc fusion
QDGNEEMGSITQTPYQVSISGTTVILGGGGTDKTHTCPPCPAPELLGGPSVFLFPPKPKDTLMISRTPEVTCVVVDVSHEDPEVKFNWYVDGVEVHNAKTKPREEQYNSTYRVVSVLTVLHQDWLNGKEYKCKVSNKALPAPIEKTISKAKGQPREPQVYTLPPSRDELTKNQVSLTCLVKGFYPSDIAVEWESNGQPENNYKTTPPVLDSDGSFFLYSKLTVDKSRWQQGNVFSCSVMHEALHNHYTQKSLSLSPGK

SEQ ID NO: 192 - protein, 264 aa, Artificial Sequence
  SEQ ID NO: 192 - Human CD38 extracellular region fused to a polyhistine tag - amino acid sequence
VPRWRQQWSGPGTTKRFPETVLARCVKYTEIHPEMRHVDCQSVWDAFKGAFISKHPCNITEEDYQPLMKLGTQTVPCNKILLWSRIKDLAHQFTQVQRDMFTLEDTLLGYLADDLTWCGEFNTSKINYQSCPDWRKDCSNNPVSVFWKTVSRRFAEAACDVVHVMLNGSRSKIFDKNSTFGSVEVHNLQPEKVQTLEAWVIHGGREDSRDLCQDPTIKELESIISKRNIQFSCKNIYRPDKFLQCVKNPEDSSCTSEIHHHHHH

SEQ ID NO: 193 - protein, 264 aa, Artificial Sequence
  SEQ ID NO: 193 - Cynomolgus monkey CD38 extracellular region fused to a polyhistine tag - amino acid sequence
VPRWRQQWSGSGTTSRFPETVLARCVKYTEVHPEMRHVDCQSVWDAFKGAFISKYPCNITEEDYQPLVKLGTQTVPCNKTLLWSRIKDLAHQFTQVQRDMFTLEDMLLGYLADDLTWCGEFNTFEINYQSCPDWRKDCSNNPVSVFWKTVSRRFAETACGVVHVMLNGSRSKIFDKNSTFGSVEVHNLQPEKVQALEAWVIHGGREDSRDLCQDPTIKELESIISKRNIRFFCKNIYRPDKFLQCVKNPEDSSCLSGIHHHHHH

SEQ ID NO: 194 - protein, 8 aa, Artificial Sequence
  SEQ ID NO: 194 - Mouse anti- human CD3 epsilon OKT3 CDR H1
GYTFTRYT

SEQ ID NO: 195 - protein, 8 aa, Artificial Sequence
  SEQ ID NO: 195 - Mouse anti- human CD3 epsilon OKT3 CDR H2
INPSRGYT

SEQ ID NO: 196 - protein, 12 aa, Artificial Sequence
  SEQ ID NO: 196 - Mouse anti- human CD3 epsilon OKT3 CDR H3
ARYYDDHYCLDY

SEQ ID NO: 197 - protein, 5 aa, Artificial Sequence
  SEQ ID NO: 197 - Mouse anti- human CD3 epsilon OKT3 CDR L1
SSVSY

SEQ ID NO: 198 - protein, 3 aa, Artificial Sequence
  SEQ ID NO: 198 - Mouse anti- human CD3 epsilon OKT3 CDR L2
DTS

SEQ ID NO: 199 - protein, 9 aa, Artificial Sequence
  SEQ ID NO: 199 - Mouse anti- human CD3 epsilon OKT3 CDR L3
QQWSSNPPT

SEQ ID NO: 200 - protein, 8 aa, Artificial Sequence
  SEQ ID NO: 200 - Mouse anti- human CD3 epsilon SP34 CDR H1
GFTFNTYA

SEQ ID NO: 201 - protein, 10 aa, Artificial Sequence
  SEQ ID NO: 201 - Mouse anti- human CD3 epsilon SP34 CDR H2
IRSKYNNYAT

SEQ ID NO: 202 - protein, 16 aa, Artificial Sequence
  SEQ ID NO: 202 - Mouse anti- human CD3 epsilon SP34 CDR H3
VRHGNFGNSYVSWFAY

SEQ ID NO: 203 - protein, 9 aa, Artificial Sequence
  SEQ ID NO: 203 - Mouse anti- human CD3 epsilon SP34 CDR L1
TGAVTTSNY

SEQ ID NO: 204 - protein, 3 aa, Artificial Sequence
  SEQ ID NO: 204 - Mouse anti- human CD3 epsilon SP34 CDR L2
GTN

SEQ ID NO: 205 - protein, 9 aa, Artificial Sequence
  SEQ ID NO: 205 - Mouse anti- human CD3 epsilon SP34 CDR L3
ALWYSNLWV

SEQ ID NO: 206 - protein, 8 aa, Artificial Sequence
  SEQ ID NO: 206 - Herceptin (trastuzumab)CDR H1
GFNIKDTY

SEQ ID NO: 207 - protein, 8 aa, Artificial Sequence
  SEQ ID NO: 207 - Herceptin (trastuzumab) CDR H2
IYPTNGYT

SEQ ID NO: 208 - protein, 13 aa, Artificial Sequence
  SEQ ID NO: 208 - Herceptin (trastuzumab) CDR H3
SRWGGDGFYAMDY

SEQ ID NO: 209 - protein, 6 aa, Artificial Sequence
  SEQ ID NO: 209 - Herceptin (trastuzumab) CDR L1
QDVNTA

SEQ ID NO: 210 - protein, 3 aa, Artificial Sequence
  SEQ ID NO: 210 - Herceptin (trastuzumab) CDR L2
SAS

SEQ ID NO: 211 - protein, 9 aa, Artificial Sequence
  SEQ ID NO: 211 - Herceptin (trastuzumab) CDR L3
QQHYTTPPT

SEQ ID NO: 212 - protein, 8 aa, Artificial Sequence
  SEQ ID NO: 212 - Mouse anti- human CD38 HB-7 CDR H1
GFSLISYG

SEQ ID NO: 213 - protein, 7 aa, Artificial Sequence
  SEQ ID NO: 213 - Mouse anti- human CD38 HB-7 CDR H2
IWRGGST

SEQ ID NO: 214 - protein, 13 aa, Artificial Sequence
  SEQ ID NO: 214 - Mouse anti- human CD38 HB-7 CDR H3
AKTLITTGYAMDY

SEQ ID NO: 215 - protein, 6 aa, Artificial Sequence
  SEQ ID NO: 215 - Mouse anti- human CD38 HB-7 CDR L1
EDIYNR

SEQ ID NO: 216 - protein, 3 aa, Artificial Sequence
  SEQ ID NO: 216 - Mouse anti- human CD38 HB-7 CDR L2
GAT

SEQ ID NO: 217 - protein, 8 aa, Artificial Sequence
  SEQ ID NO: 217 - Mouse anti- human CD38 HB-7 CDR L3
QQYWSTPT

SEQ ID NO: 218 - protein, 8 aa, Artificial Sequence
  SEQ ID NO: 218 - Mouse anti- human CD38 OKT10 CDR H1
GFDFSRSW

SEQ ID NO: 219 - protein, 9 aa, Artificial Sequence
  SEQ ID NO: 219 - Mouse anti- human CD38 OKT10 CDR H2
INPDSSTIV

SEQ ID NO: 220 - protein, 9 aa, Artificial Sequence
  SEQ ID NO: 220 - Mouse anti- human CD38 OKT10 CDR H3
ARYGNWFPY

SEQ ID NO: 221 - protein, 6 aa, Artificial Sequence
  SEQ ID NO: 221 - Mouse anti- human CD38 OKT10 CDR L1
QNVDTN

SEQ ID NO: 222 - protein, 3 aa, Artificial Sequence
  SEQ ID NO: 222 - Mouse anti- human CD38 OKT10 CDR L2
SAS

SEQ ID NO: 223 - protein, 15 aa, Artificial Sequence
  SEQ ID NO: 223 - Mouse anti- human CD38 OKT10 CDR L3
QQYDSYPLTFGAGTK

SEQ ID NO: 224 - protein, 10 aa, Artificial Sequence
  SEQ ID NO: 224 - Mouse anti- human CD38 9G7 CDR H1
GLSLSTSGKG

SEQ ID NO: 225 - protein, 7 aa, Artificial Sequence
  SEQ ID NO: 225 - Mouse anti- human CD38 9G7 CDR H2
IWWDDDK

SEQ ID NO: 226 - protein, 13 aa, Artificial Sequence
  SEQ ID NO: 226 - Mouse anti- human CD38 9G7 CDR H3
ARIELGRSYVMDY

SEQ ID NO: 227 - protein, 6 aa, Artificial Sequence
  SEQ ID NO: 227 - Mouse anti- human CD38 9G7 CDR L1
QDVITS

SEQ ID NO: 228 - protein, 3 aa, Artificial Sequence
  SEQ ID NO: 228 - Mouse anti- human CD38 9G7 CDR L2
SAS

SEQ ID NO: 229 - protein, 9 aa, Artificial Sequence
  SEQ ID NO: 229 - Mouse anti- human CD38 9G7 CDR L3
QQHYTIPLT

SEQ ID NO: 230 - protein, 8 aa, Artificial Sequence
  SEQ ID NO: 230 - Human anti- human CD38 767 CDR H1
GFTFSSYW

SEQ ID NO: 231 - protein, 8 aa, Artificial Sequence
  SEQ ID NO: 231 - Human anti- human CD38767 CDR H2
IKQDGSEK

SEQ ID NO: 232 - protein, 11 aa, Artificial Sequence
  SEQ ID NO: 232 - Human anti- human CD38767 CDR H3
AREGRTGYFDY

SEQ ID NO: 233 - protein, 8 aa, Artificial Sequence
  SEQ ID NO: 233 - Human anti- human CD38767 CDR L1
TSNIGTNY

SEQ ID NO: 234 - protein, 3 aa, Artificial Sequence
  SEQ ID NO: 234 - Human anti- human CD38767 CDR L2
RND

SEQ ID NO: 235 - protein, 12 aa, Artificial Sequence
  SEQ ID NO: 235 - Human anti- human CD38767 CDR L3
AAWDDSRSGVYA

SEQ ID NO: 236 - protein, 10 aa, Artificial Sequence
  SEQ ID NO: 236 - Mouse anti-human OX40 CDR H1 from WO2013/008171
GFSLSTSGMG

SEQ ID NO: 237 - protein, 7 aa, Artificial Sequence
  SEQ ID NO: 237 - Mouse anti-human OX40 CDR H2 from WO2013/008171
IWWDDDK

SEQ ID NO: 238 - protein, 10 aa, Artificial Sequence
  SEQ ID NO: 238 - Mouse anti-human OX40 CDR H3 from WO2013/008171
ARIDWDGFAY

SEQ ID NO: 239 - protein, 5 aa, Artificial Sequence
  SEQ ID NO: 239 - Mouse anti-human OX40 CDR L1 from WO2013/008171
SSVSY

SEQ ID NO: 240 - protein, 3 aa, Artificial Sequence
  SEQ ID NO: 240 - Mouse anti-human OX40 CDR L2 from WO2013/008171
ATS

SEQ ID NO: 241 - protein, 9 aa, Artificial Sequence
  SEQ ID NO: 241 - Mouse anti-human OX40 CDR L3 from WO2013/008171
QQWSSNPWT

SEQ ID NO: 242 - protein, 8 aa, Artificial Sequence
  SEQ ID NO: 242 - Rituxan (rituximab) CDR H1
GYTFTSYN

SEQ ID NO: 243 - protein, 8 aa, Artificial Sequence
  SEQ ID NO: 243 - Rituxan (rituximab) CDR H2
IYPGNGDT

SEQ ID NO: 244 - protein, 14 aa, Artificial Sequence
  SEQ ID NO: 244 - Rituxan (rituximab) CDR H3
ARSTYYGGDWYFNV

SEQ ID NO: 245 - protein, 7 aa, Artificial Sequence
  SEQ ID NO: 245 - Rituxan (rituximab) CDR L1
ASSSVSY

SEQ ID NO: 246 - protein, 3 aa, Artificial Sequence
  SEQ ID NO: 246 - Rituxan (rituximab) CDR L2
ATS

SEQ ID NO: 247 - protein, 9 aa, Artificial Sequence
  SEQ ID NO: 247 - Rituxan (rituximab) CDR L3
QQWTSNPPT

SEQ ID NO: 248 - protein, 8 aa, Artificial Sequence
  SEQ ID NO: 248 - Erbitux (cetuximab) CDR H1
GFSLTNYG

SEQ ID NO: 249 - protein, 7 aa, Artificial Sequence
  SEQ ID NO: 249 - Erbitux (cetuximab) CDR H2
IWSGGNT

SEQ ID NO: 250 - protein, 13 aa, Artificial Sequence
  SEQ ID NO: 250 - Erbitux (cetuximab) CDR H3
ARALTYYDYEFAY

SEQ ID NO: 251 - protein, 6 aa, Artificial Sequence
  SEQ ID NO: 251 - Erbitux (cetuximab) CDR L1
QSIGTN

SEQ ID NO: 252 - protein, 3 aa, Artificial Sequence
  SEQ ID NO: 252 - Erbitux (cetuximab) CDR L2
YAS

SEQ ID NO: 253 - protein, 9 aa, Artificial Sequence
  SEQ ID NO: 253 - Erbitux (cetuximab) CDR L3
QQNNNWPTT

SEQ ID NO: 254 - protein, 10 aa, Artificial Sequence
  SEQ ID NO: 254 - Vectibix (panitumumab) CDR H1
GGSVSSGDYY

SEQ ID NO: 255 - protein, 7 aa, Artificial Sequence
  SEQ ID NO: 255 - Vectibix (panitumumab) CDR H2
IYYSGNT

SEQ ID NO: 256 - protein, 11 aa, Artificial Sequence
  SEQ ID NO: 256 - Vectibix (panitumumab) CDR H3
VRDRVTGAFDI

SEQ ID NO: 257 - protein, 6 aa, Artificial Sequence
  SEQ ID NO: 257 - Vectibix (panitumumab) CDR L1
QDISNY

SEQ ID NO: 258 - protein, 3 aa, Artificial Sequence
  SEQ ID NO: 258 - Vectibix (panitumumab) CDR L2
DAS

SEQ ID NO: 259 - protein, 9 aa, Artificial Sequence
  SEQ ID NO: 259 - Vectibix (panitumumab) CDR L3
QHFDHLPLA

SEQ ID NO: 260 - protein, 8 aa, Artificial Sequence
  SEQ ID NO: 260 - Mouse anti-human CD19 CDR H1 from WO2010/095031
GVSLPDYG

SEQ ID NO: 261 - protein, 7 aa, Artificial Sequence
  SEQ ID NO: 261 - Mouse anti-human CD19 CDR H2 from WO2010/095031
IWGSETT

SEQ ID NO: 262 - protein, 14 aa, Artificial Sequence
  SEQ ID NO: 262 - Mouse anti-human CD19 CDR H3 from WO2010/095031
AKHYYYGGSYAMDY

SEQ ID NO: 263 - protein, 6 aa, Artificial Sequence
  SEQ ID NO: 263 - Mouse anti-human CD19 CDR L1 from WO2010/095031
QDISKY

SEQ ID NO: 264 - protein, 3 aa, Artificial Sequence
  SEQ ID NO: 264 - Mouse anti-human CD19 CDR L2 from WO2010/095031
HTS

SEQ ID NO: 265 - protein, 9 aa, Artificial Sequence
  SEQ ID NO: 265 - Mouse anti-human CD19 CDR L3 from WO2010/095031
QQGATLPYT

SEQ ID NO: 266 - protein, 8 aa, Artificial Sequence
  SEQ ID NO: 266 - Bsw17 CDR H1
GFTFSSYA

SEQ ID NO: 267 - protein, 7 aa, Artificial Sequence
  SEQ ID NO: 267 - Bsw17 CDR H2
ISSGNII

SEQ ID NO: 268 - protein, 12 aa, Artificial Sequence
  SEQ ID NO: 268 - Bsw17 CDR H3
TRGRSTYGGFDH

SEQ ID NO: 269 - protein, 5 aa, Artificial Sequence
  SEQ ID NO: 269 - Bsw17 CDR L1
SSVTF

SEQ ID NO: 270 - protein, 3 aa, Artificial Sequence
  SEQ ID NO: 270 - Bsw17 CDR L2
DTS

SEQ ID NO: 271 - protein, 9 aa, Artificial Sequence
  SEQ ID NO: 271 - Bsw17 CDR L3
QHWSGNPLT

SEQ ID NO: 272 - protein, 9 aa, Artificial Sequence
  SEQ ID NO: 272 - Omalizumab CDR H1
GYSITSGYS

SEQ ID NO: 273 - protein, 7 aa, Artificial Sequence
  SEQ ID NO: 273 - Omalizumab CDR H2
ITYDGST

SEQ ID NO: 274 - protein, 14 aa, Artificial Sequence
  SEQ ID NO: 274 - Omalizumab CDR H3
ARGSHYFGHWHFAV

SEQ ID NO: 275 - protein, 10 aa, Artificial Sequence
  SEQ ID NO: 275 - Omalizumab CDR L1
QSVDYDGDSY

SEQ ID NO: 276 - protein, 3 aa, Artificial Sequence
  SEQ ID NO: 276 - Omalizumab CDR L2
AAS

SEQ ID NO: 277 - protein, 9 aa, Artificial Sequence
  SEQ ID NO: 277 - Omalizumab CDR L3
QQSHEDPYT

SEQ ID NO: 278 - protein, 118 aa, Artificial Sequence
  SEQ ID NO: 278 - Humanized anti-OX40/mingraft VH domain
EVQLVESGGGLVQPGGSLRLSCAASGFSLSTSGMGMSWVRQAPGKGLEWVSAIWWDDDKYYADSVKGRFTISRDNSKNTLYLQMNSLRAEDTAVYYCARIDWDGFAYWGQGTLVTVSS

SEQ ID NO: 279 - protein, 118 aa, Artificial Sequence
  SEQ ID NO: 279 - Humanized anti-OX40/maxgraft VH domain
EVQLVESGGGLVQPGGSLRLSCAFSGFSLSTSGMGVGWIRQAPGKGLEWLAHIWWDDDKYYNTALKSGLTISKDTSKNTVYLQMNSLRAEDTAVYYCARIDWDGFAYWGQGTLVTVSS

SEQ ID NO: 280 - protein, 106 aa, Artificial Sequence
  SEQ ID NO: 280 - Humanized anti-OX40/mingraft VL domain
DIQMTQSPSSLSASVGDRVTITCRASSSVSYLNWYQQKPGKAPKLLIYATSSLQSGVPSRFSGSGSGTDFTLTISSLQPEDFATYYCQQWSSNPWTFGQGTKVEIK

SEQ ID NO: 281 - protein, 106 aa, Artificial Sequence
  SEQ ID NO: 281 - Humanized anti-OX40/maxgraft VL domain
DIQLTQSPSSLSASVGDRVTITCRASSSVSYMHWYQQKPGKAPKPWIYATSNLASGVPSRFSGSGSGTDYTLTISSLQPEDFATYYCQQWSSNPWTFGQGTKVEIK

SEQ ID NO: 282 - protein, 121 aa, Artificial Sequence
  SEQ ID NO: 282 - Humanized Rituximab/mingraft VH domain
EVQLVESGGGLVQPGGSLRLSCAASGYTFTSYNMSWVRQAPGKGLEWVSAIYPGNGDTYYADSVKGRFTISRDNSKNTLYLQMNSLRAEDTAVYYCARSTYYGGDWYFNVWGQGTLVTVSS

SEQ ID NO: 283 - protein, 121 aa, Artificial Sequence
  SEQ ID NO: 283 - Humanized Rituximab/maxgraft VH domain
EVQLVESGGGLVQPGGSLRLSCAASGYTFTSYNMSWVRQAPGKGLEWIGAIYPGNGDTYYADSVKGRATLSADKSKNTAYLQMNSLRAEDTAVYYCARSTYYGGDWYFNVWGQGTLVTVSS

SEQ ID NO: 284 - protein, 108 aa, Artificial Sequence
  SEQ ID NO: 284 - Humanized Rituximab/mingraft VL domain
DIQMTQSPSSLSASVGDRVTITCRASASSSVSYLNWYQQKPGKAPKLLIYATSSLQSGVPSRFSGSGSGTDFTLTISSLQPEDFATYYCQQWTSNPPTFGQGTKVEIK

SEQ ID NO: 285 - protein, 108 aa, Artificial Sequence
  SEQ ID NO: 285 - Humanized Rituximab/maxgraft VL domain
DIQLTQSPSSLSASVGDRVTITCRLSASSSVSYLNWFQQKPGKAPKPWIYATSSLQSGVPSRFSGSGSGTDYTLTISSLQPEDFATYYCQQWTSNPPTFGQGTKVEIK

SEQ ID NO: 286 - protein, 119 aa, Artificial Sequence
  SEQ ID NO: 286 - Humanized Erbitux/mingraft VH domain
EVQLVESGGGLVQPGGSLRLSCAASGFSLTNYGMSWVRQAPGKGLEWVSAIWSGGNTYYADSVKGRFTISRDNSKNTLYLQMNSLRAEDTAVYYCARALTYYDYEFAYWGQGTLVTVSS

SEQ ID NO: 287 - protein, 119 aa, Artificial Sequence
  SEQ ID NO: 287 - Humanized Erbitux/maxgraft VH domain
EVQLVESGGGLVQPGGSLRLSCAASGFSLTNYGVHWVRQAPGKGLEWLGAIWSGGNTDYNTPFTGRLTISKDNSKNTLYLQMNSLRAEDTAVYYCARALTYYDYEFAYWGQGTLVTVSS

SEQ ID NO: 288 - protein, 107 aa, Artificial Sequence
  SEQ ID NO: 288 - Humanized Erbitux/mingraft VL domain
DIQMTQSPSSLSASVGDRVTITCRASQSIGTNLNWYQQKPGKAPKLLIYYASSLQSGVPSRFSGSGSGTDFTLTISSLQPEDFATYYCQQNNNWPTTFGQGTKVEIK

SEQ ID NO: 289 - protein, 107 aa, Artificial Sequence
  SEQ ID NO: 289 - Humanized Erbitux/maxgraft VL domain
DIQLTQSPSSLSASVGDRVTITCRASQSIGTNIHWYQQKPGKAPKLLIKYASESISGVPSRFSGSGSGTDFTLTISSLQPEDFATYYCQQNNNWPTTFGQGTKVEIK

SEQ ID NO: 290 - protein, 119 aa, Artificial Sequence [sequence omitted]

SEQ ID NO: 291 - protein, 107 aa, Artificial Sequence [sequence omitted]

SEQ ID NO: 292 - protein, 119 aa, Artificial Sequence
  SEQ ID NO: 292 - Humanized Vectibix/mingraft VH domain
EVQLVESGGGLVQPGGSLRLSCAASGGSVSSGDYYMSWVRQAPGKGLEWVSAIYYSGNTYYADSVKGRFTISRDNSKNTLYLQMNSLRAEDTAVYYCVRDRVTGAFDIWGQGTLVTVSS

SEQ ID NO: 293 - protein, 119 aa, Artificial Sequence
  SEQ ID NO: 293 - Humanized Vectibix/maxgraft VH domain
EVQLVESGGGLVQPGGSLRLSCAVSGGSVSSGDYYMSWVRQAPGKGLEWIGAIYYSGNTYYADSVKGRLTISIDTSKNTFYLQMNSLRAEDTAVYYCVRDRVTGAFDIWGQGTLVTVSS

SEQ ID NO: 294 - protein, 107 aa, Artificial Sequence
  SEQ ID NO: 294 - Humanized Vectibix/mingraft VL domain
DIQMTQSPSSLSASVGDRVTITCRASQDISNYLNWYQQKPGKAPKLLIYDASSLQSGVPSRFSGSGSGTDFTLTISSLQPEDFATYYCQHFDHLPLAFGQGTKVEIK

SEQ ID NO: 295 - protein, 107 aa, Artificial Sequence [sequence omitted]

SEQ ID NO: 296 - protein, 120 aa, Artificial Sequence
  SEQ ID NO: 296 - anti-human CD19 VH domain from WO2010/095031
QVQLVQSGGGVVQPGRSLRLSCAASGVSLPDYGVSWVRQAPGKGLEWVAVIWGSETTYYNSALKSRFTISRDNSKNTLYLQMNSLRAEDTAVYYCAKHYYYGGSYAMDYWGQGTLVTVSS

SEQ ID NO: 297 - protein, 107 aa, Artificial Sequence
  SEQ ID NO: 297 - anti-human CD19 VL domain from WO2010/095031
DIQMTQSPSSLSASVGDRVTITCRASQDISKYLNWYQQKPGKAIKLLIYHTSRLHSGVPSRFSGSGSGTDFTLTISSLQPEDFATYYCQQGATLPYTFGPGTKVDIK

SEQ ID NO: 298 - protein, 121 aa, Artificial Sequence
  SEQ ID NO: 298 - Omalizumab VH domain
EVQLVESGGGLVQPGGSLRLSCAVSGYSITSGYSWNWIRQAPGKGLEWVASITYDGSTNYADSVKGRFTISRDDSKNTFYLQMNSLRAEDTAVYYCARGSHYFGHWHFAVWGQGTLVTVSS

SEQ ID NO: 299 - protein, 111 aa, Artificial Sequence [sequence omitted]

SEQ ID NO: 300 - protein, 121 aa, Artificial Sequence; identical to SEQ ID NO: 298
  SEQ ID NO: 300 - Stabilized Omalizumab/maxgraft VH domain

SEQ ID NO: 301 - protein, 121 aa, Artificial Sequence
  SEQ ID NO: 301 - Stabilized Omalizumab/mingraft VH domain
EVQLVESGGGLVQPGGSLRLSCAASGYSITSGYSMSWVRQAPGKGLEWVSAITYDGSTYYADSVKGRFTISRDNSKNTLYLQMNSLRAEDTAVYYCARGSHYFGHWHFAVWGQGTLVTVSS

SEQ ID NO: 302 - protein, 111 aa, Artificial Sequence [sequence omitted]

SEQ ID NO: 303 - protein, 111 aa, Artificial Sequence
  SEQ ID NO: 303 - Stabilized Omalizumab/mingraft VL domain
DIQMTQSPSSLSASVGDRVTITCRASQSVDYDGDSYLNWYQQKPGKAPKLLIYAASSLQSGVPSRFSGSGSGTDFTLTISSLQPEDFATYYCQQSHEDPYTFGQGTKVEIK

SEQ ID NO: 304 - protein, 118 aa, Artificial Sequence
  SEQ ID NO: 304 - Bsw17 mouse VH domain
EVQLLESGGGFVKPGGSLKLSCVVSGFTFSSYAMSWVRQTPEKRLEWVASISSGNIIYYPDNVKGRFTISRDNVRNILYLQMSSLRSEDTAMYYCTRGRSTYGGFDHWGQGTTLTVSS

SEQ ID NO: 305 - protein, 106 aa, Artificial Sequence
  SEQ ID NO: 305 - Bsw17 mouse VL domain
ELVMTQSPAIMSASPGEKVTMTCSASSSVTFIHWYRQKSGTSPKGWIYDTSKLASGVPARFSGSGSGTSYSLTISTMEAEDAATYYCQHWSGNPLTFGTGTKLELK

SEQ ID NO: 306 - protein, 118 aa, Artificial Sequence
  SEQ ID NO: 306 - Humanized Bsw17/mingraft VH domain
EVQLVESGGGLVQPGGSLRLSCAASGFTFSSYAMSWVRQAPGKGLEWVSAISSGNIIYYADSVKGRFTISRDNSKNTLYLQMNSLRAEDTAVYYCTRGRSTYGGFDHWGQGTLVTVSS

SEQ ID NO: 307 - protein, 118 aa, Artificial Sequence
  SEQ ID NO: 307 - Humanized Bsw17/maxgraft VH domain
EVQLVESGGGLVKPGGSLRLSCAVSGFTFSSYAMSWVRQAPGKGLEWVASISSGNIIYYPDNVKGRFTISRDNAKNSLYLQMNSLRAEDTAVYYCTRGRSTYGGFDHWGQGTTVTVSS

SEQ ID NO: 308 - protein, 106 aa, Artificial Sequence
  SEQ ID NO: 308 - Humanized Bsw17/mingraft VL domain
DIQMTQSPSSLSASVGDRVTITCRASSSVTFLNWYQQKPGKAPKLLIYDTSSLQSGVPSRFSGSGSGTDFTLTISSLQPEDFATYYCQHWSGNPLTFGQGTKVEIK

SEQ ID NO: 309 - protein, 106 aa, Artificial Sequence
  SEQ ID NO: 309 - Humanized Bsw17/maxgraft VL domain
DLQMTQSPSSLSASVGDRVTITCSASSSVTFLNWYQQKPGKAPWLLIYDTSSLQSGVPSRFSGSGSGTDYTLTISSMQPEDFATYYCQHWSGNPLTFGQGTKVEIK

SEQ ID NO: 310 - protein, 449 aa, Artificial Sequence
  SEQ ID NO: 310 - BEAT HER2/CD3(SP34-Kappa2) antibody FAB heavy chain (anti-HER2 FAB arm with G65S substitution BT33 LALA)
EVQLVESGGGLVQPGGSLRLSCAASGFNIKDTYIHWVRQAPGKGLEWVARIYPTNGYTRYADSVKSRFTISADTSKNTAYLQMNSLRAEDTAVYYCSRWGGDGFYAMDYWGQGTLVTVSSASTKGPSVFPLAPSSKSTSGGTAALGCLVKDYFPEPVTVSWNSGALTSGVHTFPAVLQSSGLYSLSSVVTVPSSSLGTQTYICNVNHKPSNTKVDKKVEPKSCDKTHTCPPCPAPEAAGGPSVFLFPPKPKDTLMISRTPEVTCVVVDVSHEDPEVQFKWYVDGVEVHNAKTKPREEQYNSTFRVVSVLTVLHQDWLNGKEYKCKVSNKALPAPIEKTISKTKGQPREPAVYTLPPSREEMTKNQVKLVCLVTGFYPSDIAVEWESSGQPENNYYTTPPMLDSDGSFSLVSWLNVDKSRWQQGNIFSCSVMHEALHNRFTQKSLSLSPG

SEQ ID NO: 311 - protein, 481 aa, Artificial Sequence
  SEQ ID NO: 311 - BEAT antibody scFv heavy chain SP34-Kappa2(anti-CD3 epsilon arm - humanized SP34 VH5/VL32 BT11 LALA)
EVQLVESGGGLVQPGGSLRLSCAASGFTFNTYAMNWVRQAPGKGLEWVARIRSKYNNYATYYADSVKGRFTISRDDSKNTLYLQMNSLRAEDTAVYYCVRHGNFGNSYVSYFAYWGQGTTVTVSSGGGGSGGGGSGGGGSEIVVTQSPATLSVSPGERATLSCRSSTGAVTAANYANWVQEKPGQAFRGLIGGANKRAPGVPARFSGSLSGDEATLTISSLQSEDFAVYYCALFYSNLWVFGQGTKLEIKGGGGTDKTHTCPPCPAPEAAGGPSVFLFPPKPKDTLMISRTPEVTCVVVDVSHEDPEVKFNWYVDGVEVHNAKTKPREEQYNSTYRVVSVLTVLHQDWLNGKEYKCKVSNKALPAPIEKTISKAKGQPREPEVATFPPSRDELTKNQVTLVCLVTGFYPSDIAVEWESNGQPENNYKTDPPLLESQGSFALSSRLRVDKSRWQQGNVFSCSVMHEALHNHYTQKSLSLSPG

SEQ ID NO: 312 - protein, 454 aa, Artificial Sequence
  SEQ ID NO: 312 - BEAT CD38-9G7bestframwork/CD3(SP34-Kappa2) antibody FAB heavy chain (anti-CD38 FAB arm with G65S substitution BT33 LALA)
EVQLVESGGGLVQPGGSLRLSCAASGFTFNTYAMNWVRQAPGKGLEWVARIRSKYNNYATYYADSVKGRFTISRDDSKNTLYLQMNSLRAEDTAVYYCVRHGNFGNSYVSWFAYWGQGTTVTVSSASTKGPSVFPLAPSSKSTSGGTAALGCLVKDYFPEPVTVSWNSGALTSGVHTFPAVLQSSGLYSLSSVVTVPSSSLGTQTYICNVNHKPSNTKVDKKVEPKSCDKTHTCPPCPAPEAAGGPSVFLFPPKPKDTLMISRTPEVTCVVVDVSHEDPEVQFKWYVDGVEVHNAKTKPREEQYNSTFRVVSVLTVLHQDWLNGKEYKCKVSNKALPAPIEKTISKTKGQPREPAVYTLPPSREEMTKNQVKLVCLVTGFYPSDIAVEWESSGQPENNYYTTPPMLDSDGSFSLVSWLNVDKSRWQQGNIFSCSVMHEALHNRFTQKSLSLSPG

SEQ ID NO: 313 - protein, 454 aa, Artificial Sequence
  SEQ ID NO: 313 - BEAT CD38-767/CD3(SP34-Kappa2) antibody FAB heavy chain (anti-CD38 FAB arm with G65S substitution BT33 LALA)
EVQLVESGGGLVQPGGSLKLSCAASGFTFNKYAMNWVRQAPGKGLEWVARIRSKYNNYATYYADSVKDRFTISRDDSKNTAYLQMNNLKTEDTAVYYCVRHGNFGNSYISYWAYWGQGTLVTVSSASTKGPSVFPLAPSSKSTSGGTAALGCLVKDYFPEPVTVSWNSGALTSGVHTFPAVLQSSGLYSLSSVVTVPSSSLGTQTYICNVNHKPSNTKVDKKVEPKSCDKTHTCPPCPAPEAAGGPSVFLFPPKPKDTLMISRTPEVTCVVVDVSHEDPEVQFKWYVDGVEVHNAKTKPREEQYNSTFRVVSVLTVLHQDWLNGKEYKCKVSNKALPAPIEKTISKTKGQPREPAVYTLPPSREEMTKNQVKLVCLVTGFYPSDIAVEWESSGQPENNYYTTPPMLDSDGSFSLVSWLNVDKSRWQQGNIFSCSVMHEALHNRFTQKSLSLSPG

SEQ ID NO: 314 - protein, 447 aa, Artificial Sequence
  SEQ ID NO: 314 - BEAT OX40maxgraft/CD3(SP34-Kappa2) antibody FAB heavy chain (anti-OX40 maxgraft FAB arm with G65S substitution BT33 LALA)
EVQLVESGGGLVQPGGSLRLSCAFSGFSLSTSGMGVGWIRQAPGKGLEWLAHIWWDDDKYYNTALKSGLTISKDTSKNTVYLQMNSLRAEDTAVYYCARIDWDGFAYWGQGTLVTVSSASTKGPSVFPLAPSSKSTSGGTAALGCLVKDYFPEPVTVSWNSGALTSGVHTFPAVLQSSGLYSLSSVVTVPSSSLGTQTYICNVNHKPSNTKVDKKVEPKSCDKTHTCPPCPAPEAAGGPSVFLFPPKPKDTLMISRTPEVTCVVVDVSHEDPEVQFKWYVDGVEVHNAKTKPREEQYNSTFRVVSVLTVLHQDWLNGKEYKCKVSNKALPAPIEKTISKTKGQPREPAVYTLPPSREEMTKNQVKLVCLVTGFYPSDIAVEWESSGQPENNYYTTPPMLDSDGSFSLVSWLNVDKSRWQQGNIFSCSVMHEALHNRFTQKSLSLSPG

SEQ ID NO: 315 - protein, 213 aa, Artificial Sequence
  SEQ ID NO: 315 - BEAT OX40maxgraft/CD3(SP34-Kappa2) antibody FAB light chain (anti-OX40 maxgraft FAB arm LC)
DIQLTQSPSSLSASVGDRVTITCRASSSVSYMHWYQQKPGKAPKPWIYATSNLASGVPSRFSGSGSGTDYTLTISSLQPEDFATYYCQQWSSNPWTFGQGTKVEIKRTVAAPSVFIFPPSDEQLKSGTASVVCLLNNFYPREAKVQWKVDNALQSGNSQESVTEQDSKDSTYSLSSTLTLSKADYEKHKVYACEVTHQGLSSPVTKSFNRGEC

SEQ ID NO: 316 - protein, 447 aa, Artificial Sequence
  SEQ ID NO: 316 - BEAT OX40mingraft/CD3(SP34-Kappa2) antibody FAB heavy chain (anti-OX40 mingraft FAB arm with G65S substitution BT33 LALA)
EVQLVESGGGLVQPGGSLRLSCAASGFSLSTSGMGMSWVRQAPGKGLEWVSAIWWDDDKYYADSVKSRFTISRDNSKNTLYLQMNSLRAEDTAVYYCARIDWDGFAYWGQGTLVTVSSASTKGPSVFPLAPSSKSTSGGTAALGCLVKDYFPEPVTVSWNSGALTSGVHTFPAVLQSSGLYSLSSVVTVPSSSLGTQTYICNVNHKPSNTKVDKKVEPKSCDKTHTCPPCPAPEAAGGPSVFLFPPKPKDTLMISRTPEVTCVVVDVSHEDPEVQFKWYVDGVEVHNAKTKPREEQYNSTFRVVSVLTVLHQDWLNGKEYKCKVSNKALPAPIEKTISKTKGQPREPAVYTLPPSREEMTKNQVKLVCLVTGFYPSDIAVEWESSGQPENNYYTTPPMLDSDGSFSLVSWLNVDKSRWQQGNIFSCSVMHEALHNRFTQKSLSLSPG

SEQ ID NO: 317 - protein, 213 aa, Artificial Sequence
  SEQ ID NO: 317 - BEAT OX40mingraft/CD3(SP34-Kappa2) antibody FAB light chain (anti-OX40 mingraft FAB arm LC)
DIQMTQSPSSLSASVGDRVTITCRASSSVSYLNWYQQKPGKAPKLLIYATSSLQSGVPSRFSGSGSGTDFTLTISSLQPEDFATYYCQQWSSNPWTFGQGTKVEIKRTVAAPSVFIFPPSDEQLKSGTASVVCLLNNFYPREAKVQWKVDNALQSGNSQESVTEQDSKDSTYSLSSTLTLSKADYEKHKVYACEVTHQGLSSPVTKSFNRGEC

SEQ ID NO: 318 - protein, 450 aa, Artificial Sequence
  SEQ ID NO: 318 - BEAT CD20maxgraft/CD3(SP34-Kappa2) antibody FAB heavy chain (anti-CD20 maxgraft FAB arm with G65S substitution BT33 LALA)
EVQLVESGGGLVQPGGSLRLSCAASGYTFTSYNMSWVRQAPGKGLEWIGAIYPGNGDTYYADSVKSRATLSADKSKNTAYLQMNSLRAEDTAVYYCARSTYYGGDWYFNVWGQGTLVTVSSASTKGPSVFPLAPSSKSTSGGTAALGCLVKDYFPEPVTVSWNSGALTSGVHTFPAVLQSSGLYSLSSVVTVPSSSLGTQTYICNVNHKPSNTKVDKKVEPKSCDKTHTCPPCPAPEAAGGPSVFLFPPKPKDTLMISRTPEVTCVVVDVSHEDPEVQFKWYVDGVEVHNAKTKPREEQYNSTFRVVSVLTVLHQDWLNGKEYKCKVSNKALPAPIEKTISKTKGQPREPAVYTLPPSREEMTKNQVKLVCLVTGFYPSDIAVEWESSGQPENNYYTTPPMLDSDGSFSLVSWLNVDKSRWQQGNIFSCSVMHEALHNRFTQKSLSLSPG

SEQ ID NO: 319 - protein, 215 aa, Artificial Sequence
  SEQ ID NO: 319 - BEAT CD20maxgraft/CD3(SP34-Kappa2) antibody FAB light chain (anti-CD20 maxgraft FAB arm LC)
DIQLTQSPSSLSASVGDRVTITCRLSASSSVSYLNWFQQKPGKAPKPWIYATSSLQSGVPSRFSGSGSGTDYTLTISSLQPEDFATYYCQQWTSNPPTFGQGTKVEIKRTVAAPSVFIFPPSDEQLKSGTASVVCLLNNFYPREAKVQWKVDNALQSGNSQESVTEQDSKDSTYSLSSTLTLSKADYEKHKVYACEVTHQGLSSPVTKSFNRGEC

SEQ ID NO: 320 - protein, 450 aa, Artificial Sequence
  SEQ ID NO: 320 - BEAT CD20mingraft/CD3(SP34-Kappa2) antibody FAB heavy chain (anti-CD20 mingraft FAB arm with G65S substitution BT33 LALA)
EVQLVESGGGLVQPGGSLRLSCAASGYTFTSYNMSWVRQAPGKGLEWVSAIYPGNGDTYYADSVKSRFTISRDNSKNTLYLQMNSLRAEDTAVYYCARSTYYGGDWYFNVWGQGTLVTVSSASTKGPSVFPLAPSSKSTSGGTAALGCLVKDYFPEPVTVSWNSGALTSGVHTFPAVLQSSGLYSLSSVVTVPSSSLGTQTYICNVNHKPSNTKVDKKVEPKSCDKTHTCPPCPAPEAAGGPSVFLFPPKPKDTLMISRTPEVTCVVVDVSHEDPEVQFKWYVDGVEVHNAKTKPREEQYNSTFRVVSVLTVLHQDWLNGKEYKCKVSNKALPAPIEKTISKTKGQPREPAVYTLPPSREEMTKNQVKLVCLVTGFYPSDIAVEWESSGQPENNYYTTPPMLDSDGSFSLVSWLNVDKSRWQQGNIFSCSVMHEALHNRFTQKSLSLSPG

SEQ ID NO: 321 - protein, 215 aa, Artificial Sequence
  SEQ ID NO: 321 - BEAT CD20mingraft/CD3(SP34-Kappa2) antibody FAB light chain (anti-CD20 mingraft FAB arm LC)
DIQMTQSPSSLSASVGDRVTITCRASASSSVSYLNWYQQKPGKAPKLLIYATSSLQSGVPSRFSGSGSGTDFTLTISSLQPEDFATYYCQQWTSNPPTFGQGTKVEIKRTVAAPSVFIFPPSDEQLKSGTASVVCLLNNFYPREAKVQWKVDNALQSGNSQESVTEQDSKDSTYSLSSTLTLSKADYEKHKVYACEVTHQGLSSPVTKSFNRGEC

SEQ ID NO: 322 - protein, 448 aa, Artificial Sequence
  SEQ ID NO: 322 - BEAT EGFRcetux-maxgraft/CD3(SP34-Kappa2) antibody FAB heavy chain (anti-EGFR cetuximab maxgraft FAB arm with G65S substitution BT33 LALA)
EVQLVESGGGLVQPGGSLRLSCAASGFSLTNYGVHWVRQAPGKGLEWLGAIWSGGNTDYNTPFTSRLTISKDNSKNTLYLQMNSLRAEDTAVYYCARALTYYDYEFAYWGQGTLVTVSSASTKGPSVFPLAPSSKSTSGGTAALGCLVKDYFPEPVTVSWNSGALTSGVHTFPAVLQSSGLYSLSSVVTVPSSSLGTQTYICNVNHKPSNTKVDKKVEPKSCDKTHTCPPCPAPEAAGGPSVFLFPPKPKDTLMISRTPEVTCVVVDVSHEDPEVQFKWYVDGVEVHNAKTKPREEQYNSTFRVVSVLTVLHQDWLNGKEYKCKVSNKALPAPIEKTISKTKGQPREPAVYTLPPSREEMTKNQVKLVCLVTGFYPSDIAVEWESSGQPENNYYTTPPMLDSDGSFSLVSWLNVDKSRWQQGNIFSCSVMHEALHNRFTQKSLSLSPG

SEQ ID NO: 323 - protein, 214 aa, Artificial Sequence
  SEQ ID NO: 323 - BEAT EGFRcetux-maxgraft/CD3(SP34-Kappa2) antibody FAB light chain (anti-EGFR cetuximab maxgraft FAB arm)
DIQLTQSPSSLSASVGDRVTITCRASQSIGTNIHWYQQKPGKAPKLLIKYASESISGVPSRFSGSGSGTDFTLTISSLQPEDFATYYCQQNNNWPTTFGQGTKVEIKRTVAAPSVFIFPPSDEQLKSGTASVVCLLNNFYPREAKVQWKVDNALQSGNSQESVTEQDSKDSTYSLSSTLTLSKADYEKHKVYACEVTHQGLSSPVTKSFNRGEC

SEQ ID NO: 324 - protein, 448 aa, Artificial Sequence
  SEQ ID NO: 324 - BEAT EGFRcetux-mingraft/CD3(SP34-Kappa2) antibody FAB heavy chain (anti-EGFR cetuximab mingraft FAB arm with G65S substitution BT33 LALA)
EVQLVESGGGLVQPGGSLRLSCAASGFSLTNYGMSWVRQAPGKGLEWVSAIWSGGNTYYADSVKSRFTISRDNSKNTLYLQMNSLRAEDTAVYYCARALTYYDYEFAYWGQGTLVTVSSASTKGPSVFPLAPSSKSTSGGTAALGCLVKDYFPEPVTVSWNSGALTSGVHTFPAVLQSSGLYSLSSVVTVPSSSLGTQTYICNVNHKPSNTKVDKKVEPKSCDKTHTCPPCPAPEAAGGPSVFLFPPKPKDTLMISRTPEVTCVVVDVSHEDPEVQFKWYVDGVEVHNAKTKPREEQYNSTFRVVSVLTVLHQDWLNGKEYKCKVSNKALPAPIEKTISKTKGQPREPAVYTLPPSREEMTKNQVKLVCLVTGFYPSDIAVEWESSGQPENNYYTTPPMLDSDGSFSLVSWLNVDKSRWQQGNIFSCSVMHEALHNRFTQKSLSLSPG

SEQ ID NO: 325 - protein, 214 aa, Artificial Sequence
  SEQ ID NO: 325 - BEAT EGFRcetux-mingraft/CD3(SP34-Kappa2) antibody FAB light chain (anti-EGFR cetuximab mingraft FAB arm)
DIQMTQSPSSLSASVGDRVTITCRASQSIGTNLNWYQQKPGKAPKLLIYYASSLQSGVPSRFSGSGSGTDFTLTISSLQPEDFATYYCQQNNNWPTTFGQGTKVEIKRTVAAPSVFIFPPSDEQLKSGTASVVCLLNNFYPREAKVQWKVDNALQSGNSQESVTEQDSKDSTYSLSSTLTLSKADYEKHKVYACEVTHQGLSSPVTKSFNRGEC

SEQ ID NO: 326 - protein, 448 aa, Artificial Sequence
  SEQ ID NO: 326 - BEAT EGFRpani-maxgraft/CD3(SP34-Kappa2) antibody FAB heavy chain (anti-EGFR panitumumab maxgraft FAB arm with G65S substitution BT33 LALA)
EVQLVESGGGLVQPGGSLRLSCAVSGGSVSSGDYYMSWVRQAPGKGLEWIGAIYYSGNTYYADSVKSRLTISIDTSKNTFYLQMNSLRAEDTAVYYCVRDRVTGAFDIWGQGTLVTVSSASTKGPSVFPLAPSSKSTSGGTAALGCLVKDYFPEPVTVSWNSGALTSGVHTFPAVLQSSGLYSLSSVVTVPSSSLGTQTYICNVNHKPSNTKVDKKVEPKSCDKTHTCPPCPAPEAAGGPSVFLFPPKPKDTLMISRTPEVTCVVVDVSHEDPEVQFKWYVDGVEVHNAKTKPREEQYNSTFRVVSVLTVLHQDWLNGKEYKCKVSNKALPAPIEKTISKTKGQPREPAVYTLPPSREEMTKNQVKLVCLVTGFYPSDIAVEWESSGQPENNYYTTPPMLDSDGSFSLVSWLNVDKSRWQQGNIFSCSVMHEALHNRFTQKSLSLSPG

SEQ ID NO: 327 - protein, 214 aa, Artificial Sequence
  SEQ ID NO: 327 - BEAT EGFRpani-maxgraft/CD3(SP34-Kappa2) antibody FAB light chain (anti-EGFR panitumumab maxgraft FAB arm)
DIQMTQSPSSLSASVGDRVTITCQASQDISNYLNWYQQKPGKAPKLLIYDASNLETGVPSRFSGSGSGTDFTFTISSLQPEDIATYFCQHFDHLPLAFGGGTKVEIKRTVAAPSVFIFPPSDEQLKSGTASVVCLLNNFYPREAKVQWKVDNALQSGNSQESVTEQDSKDSTYSLSSTLTLSKADYEKHKVYACEVTHQGLSSPVTKSFNRGEC

SEQ ID NO: 328 - protein, 448 aa, Artificial Sequence
  SEQ ID NO: 328 - BEAT EGFRpani-mingraft/CD3(SP34-Kappa2) antibody FAB heavy chain (anti-EGFR panitumumab mingraft FAB arm with G65S substitution BT33 LALA)
EVQLVESGGGLVQPGGSLRLSCAASGGSVSSGDYYMSWVRQAPGKGLEWVSAIYYSGNTYYADSVKSRFTISRDNSKNTLYLQMNSLRAEDTAVYYCVRDRVTGAFDIWGQGTLVTVSSASTKGPSVFPLAPSSKSTSGGTAALGCLVKDYFPEPVTVSWNSGALTSGVHTFPAVLQSSGLYSLSSVVTVPSSSLGTQTYICNVNHKPSNTKVDKKVEPKSCDKTHTCPPCPAPEAAGGPSVFLFPPKPKDTLMISRTPEVTCVVVDVSHEDPEVQFKWYVDGVEVHNAKTKPREEQYNSTFRVVSVLTVLHQDWLNGKEYKCKVSNKALPAPIEKTISKTKGQPREPAVYTLPPSREEMTKNQVKLVCLVTGFYPSDIAVEWESSGQPENNYYTTPPMLDSDGSFSLVSWLNVDKSRWQQGNIFSCSVMHEALHNRFTQKSLSLSPG

SEQ ID NO: 329 - protein, 214 aa, Artificial Sequence
  SEQ ID NO: 329 - BEAT EGFRpani-mingraft/CD3(SP34-Kappa2) antibody FAB light chain (anti-EGFR panitumumab mingraft FAB arm)
DIQMTQSPSSLSASVGDRVTITCRASQDISNYLNWYQQKPGKAPKLLIYDASSLQSGVPSRFSGSGSGTDFTLTISSLQPEDFATYYCQHFDHLPLAFGQGTKVEIKRTVAAPSVFIFPPSDEQLKSGTASVVCLLNNFYPREAKVQWKVDNALQSGNSQESVTEQDSKDSTYSLSSTLTLSKADYEKHKVYACEVTHQGLSSPVTKSFNRGEC

SEQ ID NO: 330 - protein, 449 aa, Artificial Sequence
  SEQ ID NO: 330 - BEAT CD19/CD3(SP34-Kappa2) antibody FAB heavy chain (anti-CD19 FAB arm with G65S substitution BT33 LALA)
QVQLVQSGGGVVQPGRSLRLSCAASGVSLPDYGVSWVRQAPGKGLEWVAVIWGSETTYYNSALKSRFTISRDNSKNTLYLQMNSLRAEDTAVYYCAKHYYYGGSYAMDYWGQGTLVTVSSASTKGPSVFPLAPSSKSTSGGTAALGCLVKDYFPEPVTVSWNSGALTSGVHTFPAVLQSSGLYSLSSVVTVPSSSLGTQTYICNVNHKPSNTKVDKKVEPKSCDKTHTCPPCPAPEAAGGPSVFLFPPKPKDTLMISRTPEVTCVVVDVSHEDPEVQFKWYVDGVEVHNAKTKPREEQYNSTFRVVSVLTVLHQDWLNGKEYKCKVSNKALPAPIEKTISKTKGQPREPAVYTLPPSREEMTKNQVKLVCLVTGFYPSDIAVEWESSGQPENNYYTTPPMLDSDGSFSLVSWLNVDKSRWQQGNIFSCSVMHEALHNRFTQKSLSLSPG

SEQ ID NO: 331 - protein, 214 aa, Artificial Sequence
  SEQ ID NO: 331 - BEAT CD19/CD3(SP34-Kappa2) antibody FAB light chain (anti-CD19 FAB arm)
DIQMTQSPSSLSASVGDRVTITCRASQDISKYLNWYQQKPGKAIKLLIYHTSRLHSGVPSRFSGSGSGTDFTLTISSLQPEDFATYYCQQGATLPYTFGPGTKVDIKRTVAAPSVFIFPPSDEQLKSGTASVVCLLNNFYPREAKVQWKVDNALQSGNSQESVTEQDSKDSTYSLSSTLTLSKADYEKHKVYACEVTHQGLSSPVTKSFNRGEC

SEQ ID NO: 332 - protein, 450 aa, Artificial Sequence
  SEQ ID NO: 332 - BEAT IgEomali-maxgraft/CD3(SP34-Kappa2) antibody FAB heavy chain (anti-IgE omalizumab maxgraft FAB arm with G65S substitution BT33 LALA)
EVQLVESGGGLVQPGGSLRLSCAVSGYSITSGYSWNWIRQAPGKGLEWVASITYDGSTNYADSVKSRFTISRDDSKNTFYLQMNSLRAEDTAVYYCARGSHYFGHWHFAVWGQGTLVTVSSASTKGPSVFPLAPSSKSTSGGTAALGCLVKDYFPEPVTVSWNSGALTSGVHTFPAVLQSSGLYSLSSVVTVPSSSLGTQTYICNVNHKPSNTKVDKKVEPKSCDKTHTCPPCPAPEAAGGPSVFLFPPKPKDTLMISRTPEVTCVVVDVSHEDPEVQFKWYVDGVEVHNAKTKPREEQYNSTFRVVSVLTVLHQDWLNGKEYKCKVSNKALPAPIEKTISKTKGQPREPAVYTLPPSREEMTKNQVKLVCLVTGFYPSDIAVEWESSGQPENNYYTTPPMLDSDGSFSLVSWLNVDKSRWQQGNIFSCSVMHEALHNRFTQKSLSLSPG

SEQ ID NO: 333 - protein, 218 aa, Artificial Sequence
  SEQ ID NO: 333 - BEAT IgEomali-maxgraft/CD3(SP34-Kappa2) antibody FAB light chain (anti-IgE omalizumab maxgraft FAB arm)
DIQLTQSPSSLSASVGDRVTITCRASQSVDYDGDSYMNWYQQKPGKAPKLLIYAASYLESGVPSRFSGSGSGTDFTLTISSLQPEDFATYYCQQSHEDPYTFGQGTKVEIKRTVAAPSVFIFPPSDEQLKSGTASVVCLLNNFYPREAKVQWKVDNALQSGNSQESVTEQDSKDSTYSLSSTLTLSKADYEKHKVYACEVTHQGLSSPVTKSFNRGEC

SEQ ID NO: 334 - protein, 450 aa, Artificial Sequence
  SEQ ID NO: 334 - BEAT IgEomali-mingraft/CD3(SP34-Kappa2) antibody FAB heavy chain (anti-IgE omalizumab mingraft FAB arm with G65S substitution BT33 LALA)
EVQLVESGGGLVQPGGSLRLSCAASGYSITSGYSMSWVRQAPGKGLEWVSAITYDGSTYYADSVKSRFTISRDNSKNTLYLQMNSLRAEDTAVYYCARGSHYFGHWHFAVWGQGTLVTVSSASTKGPSVFPLAPSSKSTSGGTAALGCLVKDYFPEPVTVSWNSGALTSGVHTFPAVLQSSGLYSLSSVVTVPSSSLGTQTYICNVNHKPSNTKVDKKVEPKSCDKTHTCPPCPAPEAAGGPSVFLFPPKPKDTLMISRTPEVTCVVVDVSHEDPEVQFKWYVDGVEVHNAKTKPREEQYNSTFRVVSVLTVLHQDWLNGKEYKCKVSNKALPAPIEKTISKTKGQPREPAVYTLPPSREEMTKNQVKLVCLVTGFYPSDIAVEWESSGQPENNYYTTPPMLDSDGSFSLVSWLNVDKSRWQQGNIFSCSVMHEALHNRFTQKSLSLSPG

SEQ ID NO: 335 - protein, 218 aa, Artificial Sequence
  SEQ ID NO: 335 - BEAT IgEomali-mingraft/CD3(SP34-Kappa2) antibody FAB light chain (anti-IgE omalizumab mingraft FAB arm)
DIQMTQSPSSLSASVGDRVTITCRASQSVDYDGDSYLNWYQQKPGKAPKLLIYAASSLQSGVPSRFSGSGSGTDFTLTISSLQPEDFATYYCQQSHEDPYTFGQGTKVEIKRTVAAPSVFIFPPSDEQLKSGTASVVCLLNNFYPREAKVQWKVDNALQSGNSQESVTEQDSKDSTYSLSSTLTLSKADYEKHKVYACEVTHQGLSSPVTKSFNRGEC

SEQ ID NO: 336 - protein, 447 aa, Artificial Sequence
  SEQ ID NO: 336 - BEAT IgEbsw17-maxgraft/CD3(SP34-Kappa2) antibody FAB heavy chain (anti-IgE omalizumab maxgraft FAB arm with G65S substitution BT33 LALA)
EVQLVESGGGLVKPGGSLRLSCAVSGFTFSSYAMSWVRQAPGKGLEWVASISSGNIIYYPDNVKSRFTISRDNAKNSLYLQMNSLRAEDTAVYYCTRGRSTYGGFDHWGQGTTVTVSSASTKGPSVFPLAPSSKSTSGGTAALGCLVKDYFPEPVTVSWNSGALTSGVHTFPAVLQSSGLYSLSSVVTVPSSSLGTQTYICNVNHKPSNTKVDKKVEPKSCDKTHTCPPCPAPEAAGGPSVFLFPPKPKDTLMISRTPEVTCVVVDVSHEDPEVQFKWYVDGVEVHNAKTKPREEQYNSTFRVVSVLTVLHQDWLNGKEYKCKVSNKALPAPIEKTISKTKGQPREPAVYTLPPSREEMTKNQVKLVCLVTGFYPSDIAVEWESSGQPENNYYTTPPMLDSDGSFSLVSWLNVDKSRWQQGNIFSCSVMHEALHNRFTQKSLSLSPG

SEQ ID NO: 337 - protein, 213 aa, Artificial Sequence
  SEQ ID NO: 337 - BEAT IgEbsw17-maxgraft/CD3(SP34-Kappa2) antibody FAB light chain (anti-IgE omalizumab maxgraft FAB arm)
DLQMTQSPSSLSASVGDRVTITCSASSSVTFLNWYQQKPGKAPWLLIYDTSSLQSGVPSRFSGSGSGTDYTLTISSMQPEDFATYYCQHWSGNPLTFGQGTKVEIKRTVAAPSVFIFPPSDEQLKSGTASVVCLLNNFYPREAKVQWKVDNALQSGNSQESVTEQDSKDSTYSLSSTLTLSKADYEKHKVYACEVTHQGLSSPVTKSFNRGEC

SEQ ID NO: 338 - protein, 447 aa, Artificial Sequence
  SEQ ID NO: 338 - BEAT IgEbsw17-mingraft/CD3(SP34-Kappa2) antibody FAB heavy chain (anti-IgE omalizumab mingraft FAB arm with G65S substitution BT33 LALA)
EVQLVESGGGLVQPGGSLRLSCAASGFTFSSYAMSWVRQAPGKGLEWVSAISSGNIIYYADSVKSRFTISRDNSKNTLYLQMNSLRAEDTAVYYCTRGRSTYGGFDHWGQGTLVTVSSASTKGPSVFPLAPSSKSTSGGTAALGCLVKDYFPEPVTVSWNSGALTSGVHTFPAVLQSSGLYSLSSVVTVPSSSLGTQTYICNVNHKPSNTKVDKKVEPKSCDKTHTCPPCPAPEAAGGPSVFLFPPKPKDTLMISRTPEVTCVVVDVSHEDPEVQFKWYVDGVEVHNAKTKPREEQYNSTFRVVSVLTVLHQDWLNGKEYKCKVSNKALPAPIEKTISKTKGQPREPAVYTLPPSREEMTKNQVKLVCLVTGFYPSDIAVEWESSGQPENNYYTTPPMLDSDGSFSLVSWLNVDKSRWQQGNIFSCSVMHEALHNRFTQKSLSLSPG

SEQ ID NO: 339 - protein, 213 aa, Artificial Sequence
  SEQ ID NO: 339 - BEAT IgEbsw17-mingraft/CD3(SP34-Kappa2) antibody FAB light chain (anti-IgE omalizumab mingraft FAB arm)
DIQMTQSPSSLSASVGDRVTITCRASSSVTFLNWYQQKPGKAPKLLIYDTSSLQSGVPSRFSGSGSGTDFTLTISSLQPEDFATYYCQHWSGNPLTFGQGTKVEIKRTVAAPSVFIFPPSDEQLKSGTASVVCLLNNFYPREAKVQWKVDNALQSGNSQESVTEQDSKDSTYSLSSTLTLSKADYEKHKVYACEVTHQGLSSPVTKSFNRGEC

SEQ ID NO: 340 - protein, 447 aa, Artificial Sequence
  SEQ ID NO: 340 - BEAT OX40/CD3(SP34-Kappa2) antibody FAB heavy chain (anti-OX40 1D4 FAB arm BT33 LALA)
QVTLKESGPALVKPTQTLTLTCSFSGFSLSTSGMGVGWIRQPPGKALEWIAHIWWDDDKYYNTALKTRLTISKDTSKNQVVLTMTNMDPVDTATYYCARIDWDGFAYWGQGTLVTVSSASTKGPSVFPLAPSSKSTSGGTAALGCLVKDYFPEPVTVSWNSGALTSGVHTFPAVLQSSGLYSLSSVVTVPSSSLGTQTYICNVNHKPSNTKVDKKVEPKSCDKTHTCPPCPAPEAAGGPSVFLFPPKPKDTLMISRTPEVTCVVVDVSHEDPEVQFKWYVDGVEVHNAKTKPREEQYNSTFRVVSVLTVLHQDWLNGKEYKCKVSNKALPAPIEKTISKTKGQPREPAVYTLPPSREEMTKNQVKLVCLVTGFYPSDIAVEWESSGQPENNYYTTPPMLDSDGSFSLVSWLNVDKSRWQQGNIFSCSVMHEALHNRFTQKSLSLSPG

SEQ ID NO: 341 - protein, 450 aa, Artificial Sequence
  SEQ ID NO: 341 - BEAT CD20/CD3(SP34-Kappa2) antibody FAB heavy chain (anti-CD20 rituximab FAB arm BT33 LALA)
QVQLQQPGAELVKPGASVKMSCKASGYTFTSYNMHWVKQTPGRGLEWIGAIYPGNGDTSYNQKFKGKATLTADKSSSTAYMQLSSLTSEDSAVYYCARSTYYGGDWYFNVWGAGTTVTVSAASTKGPSVFPLAPSSKSTSGGTAALGCLVKDYFPEPVTVSWNSGALTSGVHTFPAVLQSSGLYSLSSVVTVPSSSLGTQTYICNVNHKPSNTKVDKKVEPKSCDKTHTCPPCPAPEAAGGPSVFLFPPKPKDTLMISRTPEVTCVVVDVSHEDPEVQFKWYVDGVEVHNAKTKPREEQYNSTFRVVSVLTVLHQDWLNGKEYKCKVSNKALPAPIEKTISKTKGQPREPAVYTLPPSREEMTKNQVKLVCLVTGFYPSDIAVEWESSGQPENNYYTTPPMLDSDGSFSLVSWLNVDKSRWQQGNIFSCSVMHEALHNRFTQKSLSLSPG

SEQ ID NO: 342 - protein, 448 aa, Artificial Sequence
  SEQ ID NO: 342 - BEAT EGFRcetux/CD3(SP34-Kappa2) antibody FAB heavy chain (anti-EGFR cetuximab FAB arm BT33 LALA)
QVQLKQSGPGLVQPSQSLSITCTVSGFSLTNYGVHWVRQSPGKGLEWLGVIWSGGNTDYNTPFTSRLSINKDNSKSQVFFKMNSLQSNDTAIYYCARALTYYDYEFAYWGQGTLVTVSAASTKGPSVFPLAPSSKSTSGGTAALGCLVKDYFPEPVTVSWNSGALTSGVHTFPAVLQSSGLYSLSSVVTVPSSSLGTQTYICNVNHKPSNTKVDKKVEPKSCDKTHTCPPCPAPEAAGGPSVFLFPPKPKDTLMISRTPEVTCVVVDVSHEDPEVQFKWYVDGVEVHNAKTKPREEQYNSTFRVVSVLTVLHQDWLNGKEYKCKVSNKALPAPIEKTISKTKGQPREPAVYTLPPSREEMTKNQVKLVCLVTGFYPSDIAVEWESSGQPENNYYTTPPMLDSDGSFSLVSWLNVDKSRWQQGNIFSCSVMHEALHNRFTQKSLSLSPG

SEQ ID NO: 343 - protein, 448 aa, Artificial Sequence
  SEQ ID NO: 343 - BEAT EGFRpani/CD3(SP34-Kappa2) antibody FAB heavy chain (anti-EGFR panitumumab FAB arm BT33 LALA)
QVQLQESGPGLVKPSETLSLTCTVSGGSVSSGDYYWTWIRQSPGKGLEWIGHIYYSGNTNYNPSLKSRLTISIDTSKTQFSLKLSSVTAADTAIYYCVRDRVTGAFDIWGQGTMVTVSSASTKGPSVFPLAPSSKSTSGGTAALGCLVKDYFPEPVTVSWNSGALTSGVHTFPAVLQSSGLYSLSSVVTVPSSSLGTQTYICNVNHKPSNTKVDKKVEPKSCDKTHTCPPCPAPEAAGGPSVFLFPPKPKDTLMISRTPEVTCVVVDVSHEDPEVQFKWYVDGVEVHNAKTKPREEQYNSTFRVVSVLTVLHQDWLNGKEYKCKVSNKALPAPIEKTISKTKGQPREPAVYTLPPSREEMTKNQVKLVCLVTGFYPSDIAVEWESSGQPENNYYTTPPMLDSDGSFSLVSWLNVDKSRWQQGNIFSCSVMHEALHNRFTQKSLSLSPG

SEQ ID NO: 344 - protein, 214 aa, Artificial Sequence; identical to SEQ ID NO: 327
  SEQ ID NO: 344 - BEAT EGFRpani/CD3(SP34-Kappa2) antibody FAB light chain (anti-EGFR panitumumab FAB arm)

SEQ ID NO: 345 - protein, 450 aa, Artificial Sequence
  SEQ ID NO: 345 - BEAT IgEomali/CD3(SP34-Kappa2) antibody FAB heavy chain (anti-IgE omalizumab FAB arm BT33 LALA)
EVQLVESGGGLVQPGGSLRLSCAVSGYSITSGYSWNWIRQAPGKGLEWVASITYDGSTNYADSVKGRFTISRDDSKNTFYLQMNSLRAEDTAVYYCARGSHYFGHWHFAVWGQGTLVTVSSASTKGPSVFPLAPSSKSTSGGTAALGCLVKDYFPEPVTVSWNSGALTSGVHTFPAVLQSSGLYSLSSVVTVPSSSLGTQTYICNVNHKPSNTKVDKKVEPKSCDKTHTCPPCPAPEAAGGPSVFLFPPKPKDTLMISRTPEVTCVVVDVSHEDPEVQFKWYVDGVEVHNAKTKPREEQYNSTFRVVSVLTVLHQDWLNGKEYKCKVSNKALPAPIEKTISKTKGQPREPAVYTLPPSREEMTKNQVKLVCLVTGFYPSDIAVEWESSGQPENNYYTTPPMLDSDGSFSLVSWLNVDKSRWQQGNIFSCSVMHEALHNRFTQKSLSLSPG

SEQ ID NO: 346 - protein, 218 aa, Artificial Sequence; identical to SEQ ID NO: 333
  SEQ ID NO: 346 - BEAT IgEomali/CD3(SP34-Kappa2) antibody FAB light chain (anti-IgE omalizumab FAB arm)

SEQ ID NO: 347 - protein, 447 aa, Artificial Sequence
  SEQ ID NO: 347 - BEAT IgEbsw17/CD3(SP34-Kappa2) antibody FAB heavy chain (anti-IgE Bsw17 FAB arm BT33 LALA)
EVQLLESGGGFVKPGGSLKLSCVVSGFTFSSYAMSWVRQTPEKRLEWVASISSGNIIYYPDNVKGRFTISRDNVRNILYLQMSSLRSEDTAMYYCTRGRSTYGGFDHWGQGTTLTVSSASTKGPSVFPLAPSSKSTSGGTAALGCLVKDYFPEPVTVSWNSGALTSGVHTFPAVLQSSGLYSLSSVVTVPSSSLGTQTYICNVNHKPSNTKVDKKVEPKSCDKTHTCPPCPAPEAAGGPSVFLFPPKPKDTLMISRTPEVTCVVVDVSHEDPEVQFKWYVDGVEVHNAKTKPREEQYNSTFRVVSVLTVLHQDWLNGKEYKCKVSNKALPAPIEKTISKTKGQPREPAVYTLPPSREEMTKNQVKLVCLVTGFYPSDIAVEWESSGQPENNYYTTPPMLDSDGSFSLVSWLNVDKSRWQQGNIFSCSVMHEALHNRFTQKSLSLSPG

SEQ ID NO: 348 - protein, 213 aa, Artificial Sequence
  SEQ ID NO: 348 - BEAT IgEbsw17/CD3(SP34-Kappa2) antibody FAB light chain (anti-IgE Bsw17 FAB arm)
ELVMTQSPAIMSASPGEKVTMTCSASSSVTFIHWYRQKSGTSPKGWIYDTSKLASGVPARFSGSGSGTSYSLTISTMEAEDAATYYCQHWSGNPLTFGTGTKLELKRTVAAPSVFIFPPSDEQLKSGTASVVCLLNNFYPREAKVQWKVDNALQSGNSQESVTEQDSKDSTYSLSSTLTLSKADYEKHKVYACEVTHQGLSSPVTKSFNRGEC

SEQ ID NO: 349 - protein, 482 aa, Artificial Sequence
  SEQ ID NO: 349 - scFv fragment  humanized SP34 VH1-VL24 - human IgG1 Fc fusion
EVQLVESGGGLVQPGGSLRLSCAASGFTFNTYAMNWVRQAPGKGLEWVARIRSKYNNYATYYADSVKGRFTISRDDSKNTLYLQMNSLRAEDTAVYYCVRHGNFGNSYVSWFAYWGQGTTVTVSSGGGGSGGGGSGGGGSEIVVTQSPATLSVSPGERATLSCRSSAAAVTTSNYANWVQEKPGQAFRGLIGGANKRAPGVPARFSGSLSGDEATLTISSLQSEDFAVYYCALWYSNLWVFGQGTKLEIKGGGGTDKTHTCPPCPAPELLGGPSVFLFPPKPKDTLMISRTPEVTCVVVDVSHEDPEVKFNWYVDGVEVHNAKTKPREEQYNSTYRVVSVLTVLHQDWLNGKEYKCKVSNKALPAPIEKTISKAKGQPREPQVYTLPPSRDELTKNQVSLTCLVKGFYPSDIAVEWESNGQPENNYKTTPPVLDSDGSFFLYSKLTVDKSRWQQGNVFSCSVMHEALHNHYTQKSLSLSPGK

SEQ ID NO: 350 - protein, 482 aa, Artificial Sequence
  SEQ ID NO: 350 - scFv fragment  humanized SP34 VH1-VL25 - human IgG1 Fc fusion
EVQLVESGGGLVQPGGSLRLSCAASGFTFNTYAMNWVRQAPGKGLEWVARIRSKYNNYATYYADSVKGRFTISRDDSKNTLYLQMNSLRAEDTAVYYCVRHGNFGNSYVSWFAYWGQGTTVTVSSGGGGSGGGGSGGGGSEIVVTQSPATLSVSPGERATLSCRSSTGAAATSNYANWVQEKPGQAFRGLIGGANKRAPGVPARFSGSLSGDEATLTISSLQSEDFAVYYCALWYSNLWVFGQGTKLEIKGGGGTDKTHTCPPCPAPELLGGPSVFLFPPKPKDTLMISRTPEVTCVVVDVSHEDPEVKFNWYVDGVEVHNAKTKPREEQYNSTYRVVSVLTVLHQDWLNGKEYKCKVSNKALPAPIEKTISKAKGQPREPQVYTLPPSRDELTKNQVSLTCLVKGFYPSDIAVEWESNGQPENNYKTTPPVLDSDGSFFLYSKLTVDKSRWQQGNVFSCSVMHEALHNHYTQKSLSLSPGK

SEQ ID NO: 351 - protein, 482 aa, Artificial Sequence
  SEQ ID NO: 351 - scFv fragment  humanized SP34 VH1-VL26 - human IgG1 Fc fusion
EVQLVESGGGLVQPGGSLRLSCAASGFTFNTYAMNWVRQAPGKGLEWVARIRSKYNNYATYYADSVKGRFTISRDDSKNTLYLQMNSLRAEDTAVYYCVRHGNFGNSYVSWFAYWGQGTTVTVSSGGGGSGGGGSGGGGSEIVVTQSPATLSVSPGERATLSCRSSTGAVTAANYANWVQEKPGQAFRGLIGGANKRAPGVPARFSGSLSGDEATLTISSLQSEDFAVYYCALWYSNLWVFGQGTKLEIKGGGGTDKTHTCPPCPAPELLGGPSVFLFPPKPKDTLMISRTPEVTCVVVDVSHEDPEVKFNWYVDGVEVHNAKTKPREEQYNSTYRVVSVLTVLHQDWLNGKEYKCKVSNKALPAPIEKTISKAKGQPREPQVYTLPPSRDELTKNQVSLTCLVKGFYPSDIAVEWESNGQPENNYKTTPPVLDSDGSFFLYSKLTVDKSRWQQGNVFSCSVMHEALHNHYTQKSLSLSPGK

SEQ ID NO: 352 - protein, 8 aa, Artificial Sequence
  SEQ ID NO: 352 - Humanized anti- human CD3 epsilon SP34 VH5 CDR H1
GFTFNTYA

SEQ ID NO: 353 - protein, 10 aa, Artificial Sequence
  SEQ ID NO: 353 - Humanized anti- human CD3 epsilon SP34 VH5 CDR H2
IRSKYNNYAT

SEQ ID NO: 354 - protein, 16 aa, Artificial Sequence
  SEQ ID NO: 354 - Humanized anti- human CD3 epsilon SP34 VH5 CDR H3
VRHGNFGNSYVSYFAY

SEQ ID NO: 355 - protein, 9 aa, Artificial Sequence
  SEQ ID NO: 355 - Humanized anti- human CD3 epsilon SP34 VL32 CDR L1
TGAVTAANY

SEQ ID NO: 356 - protein, 3 aa, Artificial Sequence
  SEQ ID NO: 356 - Humanized anti- human CD3 epsilon SP34 VL32 CDR L2
GAN

SEQ ID NO: 357 - protein, 9 aa, Artificial Sequence
  SEQ ID NO: 357 - Humanized anti- human CD3 epsilon SP34 VL32 CDR L3
ALFYSNLWV

SEQ ID NO: 358 - protein, 119 aa, Artificial Sequence
  SEQ ID NO: 358 - OKT3 humanized VH9 domain
EVQLVESGGGLVQPGGSLRLSCAASGYTFTRYTMHWVRQAPGKGLEWIGYINPSRGYTYYADSVKSRFTLSTDKSKNTAYLQMNSLRAEDTAVYYCARYYDDHYCLDYWGQGTLVTVSS

SEQ ID NO: 359 - protein, 455 aa, Artificial Sequence
  SEQ ID NO: 359 - SP34 humanized IgG1 heavy chain with VH5
EVQLVESGGGLVQPGGSLRLSCAASGFTFNTYAMNWVRQAPGKGLEWVARIRSKYNNYATYYADSVKGRFTISRDDSKNTLYLQMNSLRAEDTAVYYCVRHGNFGNSYVSYFAYWGQGTTVTVSSASTKGPSVFPLAPSSKSTSGGTAALGCLVKDYFPEPVTVSWNSGALTSGVHTFPAVLQSSGLYSLSSVVTVPSSSLGTQTYICNVNHKPSNTKVDKKVEPKSCDKTHTCPPCPAPELLGGPSVFLFPPKPKDTLMISRTPEVTCVVVDVSHEDPEVKFNWYVDGVEVHNAKTKPREEQYNSTYRVVSVLTVLHQDWLNGKEYKCKVSNKALPAPIEKTISKAKGQPREPQVYTLPPSREEMTKNQVSLTCLVKGFYPSDIAVEWESNGQPENNYKTTPPVLDSDGSFFLYSKLTVDKSRWQQGNVFSCSVMHEALHNHYTQKSLSLSPGK

SEQ ID NO: 360 - protein, 218 aa, Artificial Sequence
  SEQ ID NO: 360 - SP34 humanized Light chain with VL32
EIVVTQSPATLSVSPGERATLSCRSSTGAVTAANYANWVQEKPGQAFRGLIGGANKRAPGVPARFSGSLSGDEATLTISSLQSEDFAVYYCALFYSNLWVFGQGTKLEIKKRTVAAPSVFIFPPSDEQLKSGTASVVCLLNNFYPREAKVQWKVDNALQSGNSQESVTEQDSKDSTYSLSSTLTLSKADYEKHKVYACEVTHQGLSSPVTKSFNRGEC

1. A hetero-dimeric immunoglobulin or fragment thereof, comprising:
(a) a first polypeptide that binds to Protein A comprising an epitope binding region that binds a first epitope and an immunoglobulin constant region; and
(b) a second polypeptide that does not bind to Protein A comprising an epitope binding region, that binds a second epitope and an immunoglobulin constant region;
wherein the first and second polypeptides comprise an engineered immunoglobulin constant region with a modified CH3 domain having a protein-protein interface, wherein the protein-protein interface of the first polypeptide comprises an amino acid substitution at a position selected from the group consisting of: 3, 5, 7, 20, 22, 26, 27, 79, 81, 84, 84.2, 85.1, 86, 88 and 90 (IMGT® numbering), and wherein the protein-protein interface of the second polypeptide comprises an amino acid substitution at a position selected from the group consisting of 3, 5, 7, 20, 22, 26, 27, 79, 81, 84, 84.2, 84.4, 85.1, 86, 88 and 90 (IMGT® numbering);
wherein the epitope binding region of the first polypeptide binds the CD3 protein complex and the epitope binding region of the second polypeptide binds a disease associated antigen or wherein the epitope binding region of the first polypeptide binds a disease associated antigen and the epitope binding region of the second polypeptide binds the CD3 protein complex; and
wherein the epitope binding region that binds the CD3 protein complex comprises a heavy chain CDR1 comprising the amino acid sequence of SEQ ID NO: 194, a heavy chain CDR2 comprising the amino acid sequence of SEQ ID NO: 195 and a heavy chain CDR3 comprising the amino acid sequence of SEQ ID NO: 196, and a light chain CDR1 comprising the amino acid sequence of SEQ ID NO: 197, a light chain CDR2 comprising the amino acid sequence of SEQ ID NO: 198 and a light chain CDR3 comprising the amino acid sequences of: SEQ ID NO: 199; or
wherein the epitope binding region that binds the CD3 protein complex comprises a heavy chain CDR1 comprising the amino acid sequence of SEQ ID NO: 200, a heavy chain CDR2 comprising the amino acid sequence of SEQ ID NO: 201 and a heavy chain CDR3 comprising the amino acid sequence of SEQ ID NO: 202, and a light chain CDR1 comprising the amino acid sequence of SEQ ID NO: 203, a light chain CDR2 comprising the amino acid sequence of SEQ ID NO: 204 and a light chain CDR3 comprising the amino acid sequences of: SEQ ID NO: 205; or
wherein the epitope binding region that binds the CD3 protein complex comprises a heavy chain CDR1 comprising the amino acid sequence of SEQ ID NO: 352, a heavy chain CDR2 comprising the amino acid sequence of SEQ ID NO: 353 and a heavy chain CDR3 comprising the amino acid sequence of SEQ ID NO: 354, and a light chain CDR1 comprising the amino acid sequence of SEQ ID NO: 355, a light chain CDR2 comprising the amino acid sequence of SEQ ID NO: 356 and a light chain CDR3 comprising the amino acid sequences of SEQ ID NO: 357.

2. A hetero-dimeric immunoglobulin or fragment thereof of claim 1, wherein the epitope binding region that binds a disease associated antigen comprises heavy chain CDR1, CDR2 and CDR3 amino acid sequences and light chain CDR1, CDR2 and CDR3 amino acid sequences, respectively, selected from the group consisting of:
i) SEQ ID NOs: 206-211;
ii) SEQ ID NOs: 212-217;
iii) SEQ ID NOs: 218-223;
iv) SEQ ID NOs: 224-229;
v) SEQ ID NOs: 230-235;
vi) SEQ ID NOs: 236-241;
vii) SEQ ID NOs: 242-247;
viii) SEQ ID NOs: 248-253;
ix) SEQ ID NOs: 254-259;
x) SEQ ID NOs: 260-265;
xi) SEQ ID NOs: 266-271; and
xii) SEQ ID NOs: 272-277.

3. The hetero-dimeric immunoglobulin or fragment thereof of claim 1, wherein the constant region of said second polypeptide comprises an IgG3 CH3 region.

4. The hetero-dimeric immunoglobulin or fragment thereof of claim 1, wherein said protein-protein interface of the second polypeptide comprises an amino acid substitution at a position 84.4 and at least one additional amino acid substitution selected from the group consisting of 3, 5, 7, 20, 22, 26, 27, 79, 81, 84, 84.2, 85.1, 86, 88 and 90 (IMGT® numbering).

5. The hetero-dimeric immunoglobulin or fragment thereof of claim 1, wherein the epitope binding region that binds the CD3 protein complex comprises a heavy chain variable region comprising the amino acid sequence of SEQ ID NO: 27, and a light chain variable region comprising the amino acid sequence of SEQ ID NO: 39; or
wherein the epitope binding region that binds the CD3 protein complex comprises a heavy chain variable region comprising the amino acid sequence of SEQ ID NO: 64, and a light chain variable region comprising the amino acid sequence of SEQ ID NO: 69; or
wherein the epitope binding region that binds the CD3 protein complex comprises a heavy chain variable region comprising the amino acid sequence of SEQ ID NO: 104, and a light chain variable region comprising the amino acid sequence of SEQ ID NO: 106.

6. The hetero-dimeric immunoglobulin or fragment thereof of claim 1, wherein said epitope binding region of said second polypeptide comprises a VH3 region and wherein said VH3 region of the second polypeptide comprises a modification that reduces or abrogates the binding of said second polypeptide to Protein A.

7. The hetero-dimeric immunoglobulin or fragment thereof of claim 6, wherein the modified VH3 region comprises an amino acid substitution selected from the group consisting of: 57, 65, 81, 82a and combination 19/57/59 (Kabat numbering).

8. The hetero-dimeric immunoglobulin or fragment thereof of claim 6, wherein the modified VH3 region comprises an amino acid substitution selected from the group consisting of: 57A, 57E, 65S, 81E, 82aS and combination 19G/57A/59A (Kabat numbering).

9. The hetero-dimeric immunoglobulin or fragment thereof of claim 1, wherein the heavy chain variable framework region comprises an amino acid substitution selected from the group consisting of: I34M, V48I, A49G, R58N/Y, I69L, A71T and T73K (Kabat numbering) and the light chain variable framework region comprises an amino acid substitution selected from the group consisting of: M4L, V33M, A34N, L46R, L47W, R66G, F71Y and P96F (Kabat numbering); or wherein the heavy chain variable framework region comprises the amino acid substitutions I34M, A49G and A71T (Kabat numbering) and the light chain variable framework region comprises the amino acid substitutions M4L, L46R, L47W and F71Y (Kabat numbering).

10. The hetero-dimeric immunoglobulin or fragment thereof of claim 1, wherein the heavy chain variable region comprises an amino acid substitution selected from the group consisting of: W100eF and W100eY (Kabat numbering) and the light chain variable region comprises an amino acid substitution selected from the group consisting of: A2I, S25A, T27A, G27aA, V27cA, T28A, T29A, S30A, N31A, Y32A, E38Q, F44P, G46L, T51A N52A, K53A, R54A, P56A, L66G, D69T, F87Y, Q89A, W91F, Y92A, S93A, N94A, and Q100G (Kabat numbering); or wherein the heavy chain variable region comprises the amino acid substitutions W100eY (Kabat numbering) and the light chain variable region comprises the amino acid substitutions A2I, T29A, S30A, T51A, F87Y, Q89A, and W91F (Kabat numbering) or light chain variable region comprises the amino acid substitutions A2I, E38Q, F87Y, and Q89A.

11. The hetero-dimeric immunoglobulin or fragment thereof of claim 1, wherein the epitope binding region of the first polypeptide is a FAB and the epitope binding region of the second polypeptide is a scFv or wherein the epitope binding region of the first polypeptide is a scFv and the epitope binding region of the second polypeptide is a FAB.

12. A hetero-dimeric immunoglobulin or fragment thereof that binds to:
i) the CD3 protein complex and HER2, wherein the first polypeptide has an amino acid sequence of SEQ ID NO: 159 and is assembled with a light chain of amino acid sequence of SEQ ID NO: 47 and binds CD3 epsilon, and wherein the second polypeptide has an amino acid sequence of SEQ ID NO: 160 and binds HER2;
ii) the CD3 protein complex and HER2, wherein the first polypeptide has an amino acid sequence of SEQ ID NO: 161 and is assembled with a cognate light chain of amino acid sequence of SEQ ID NO: 3 and binds HER2, and wherein the second polypeptide has an amino acid sequence of SEQ ID NO: 162 and binds CD3 epsilon;
iii) the CD3 protein complex and HER2, wherein the first polypeptide has an amino acid sequence of SEQ ID NO: 163 and is assembled with a light chain of amino acid sequence of SEQ ID NO: 47 and binds CD3 epsilon, and wherein the second polypeptide has an amino acid sequence of SEQ ID NO: 164 and binds HER2;
iv) the CD3 protein complex and HER2, wherein the first polypeptide has an amino acid sequence of SEQ ID NO: 165 and is assembled with a light chain of amino acid sequence of SEQ ID NO: 166 and binds CD3 epsilon, and wherein the second polypeptide has an amino acid sequence of SEQ ID NO: 167 and binds HER2;
v) the CD3 protein complex and HER2, wherein the first polypeptide has an amino acid sequence of SEQ ID NO: 168 and is assembled with a light chain of amino acid sequence of SEQ ID NO: 89 and binds CD3 epsilon, and wherein the second polypeptide has an amino acid sequence of SEQ ID NO: 167 and binds HER2;
vi) the CD3 protein complex and CD38, wherein the first polypeptide has an amino acid sequence of SEQ ID NO: 169 and is assembled with a cognate light chain of amino acid sequence of SEQ ID NO: 119 and binds CD38, and wherein the second polypeptide has an amino acid sequence of SEQ ID NO: 162 and binds CD3 epsilon;
vii) the CD3 protein complex and CD38, wherein the first polypeptide has an amino acid sequence of SEQ ID NO: 170 and is assembled with a cognate light chain of amino acid sequence of SEQ ID NO: 138 and binds CD38, and wherein the second polypeptide has an amino acid sequence of SEQ ID NO: 171 and binds CD3 epsilon;
viii) the CD3 protein complex and CD38, wherein the first polypeptide has an amino acid sequence of SEQ ID NO: 176 and is assembled with a cognate light chain of amino acid sequence of SEQ ID NO: 119 and binds CD38, and wherein the second polypeptide has an amino acid sequence of SEQ ID NO: 177 and binds CD3 epsilon;
ix) the CD3 protein complex and CD38, wherein the first polypeptide has an amino acid sequence of SEQ ID NO: 178 and is assembled with a cognate light chain of amino acid sequence of SEQ ID NO: 128 and binds CD38, and wherein the second polypeptide has an amino acid sequence of SEQ ID NO: 179 and binds CD3 epsilon;
x) the CD3 protein complex and OX40 wherein the first polypeptide has an amino acid sequence of SEQ ID NO: 172 and is assembled with a cognate light chain of amino acid sequence of SEQ ID NO: 173 and binds OX40, and wherein the second polypeptide has an amino acid sequence of SEQ ID NO: 162 and binds CD3 epsilon;
xi) the CD3 protein complex and EGFR wherein the first polypeptide has an amino acid sequence of SEQ ID NO: 174 and is assembled with a cognate light chain of amino acid sequence of SEQ ID NO: 175 and binds EGFR, and wherein the second polypeptide has an amino acid sequence of SEQ ID NO: 171 and binds CD3 epsilon;
xii) the CD3 protein complex and CD20, wherein the first polypeptide has an amino acid sequence of SEQ ID NO: 180 and is assembled with a cognate light chain of amino acid sequence of SEQ ID NO: 181 and binds CD20, and wherein the second polypeptide has an amino acid sequence of SEQ ID NO: 177 and binds CD3 epsilon.

13. An in vitro method for the production of a hetero-dimeric immunoglobulin or fragment thereof of claim 1 comprising the following steps:
ia) preparing a DNA vector encoding a heavy chain of the first polypeptide and a DNA vector encoding a heavy chain of the second polypeptide wherein one or both DNA vectors or a third DNA vector optionally encode a common light chain or a light chain that assembles with a heavy chain of the first or second polypeptide; or
ib) preparing one DNA vector encoding heavy chains of the first and second polypeptides wherein the DNA vector optionally encodes a common light chain or a light chain that assembles with a heavy chain of the first or second polypeptide; and
wherein said DNA vectors are suitable for transient or stable expression in a mammalian host cell;
ii) transfecting or co-transfecting the DNA vector(s) from (ia) or (ib) in a mammalian host cell line;
iii) culturing the transfected cell line or stably selected clone therefrom and harvesting the cell culture supernatant;
iv) contacting the cell culture supernatant on a Protein A affinity chromatography resin; and
v) eluting and collecting the hetero-dimeric immunoglobulin of interest.

14. A method according to claim 13, wherein the hetero-dimeric immunoglobulin or fragment thereof found in the purified material from step (v) is at least 95% pure as determined by capillary electrophoresis.
